(19) United States
(12) Patent Application Publication
(10) Pub. No.: US 2023/0242899 A1
(43) Pub. Date: Aug. 3, 2023

(54) METHODS AND COMPOSITIONS FOR MODULATING A GENOME

(71) Applicant: FLAGSHIP PIONEERING INNOVATIONS VI, LLC, Cambridge, MA (US)

(72) Inventors: Barrett Ethan STEINBERG, Somerville, MA (US); Anne Helen BOTHMER, Cambridge, MA (US); William Edward SALOMON, West Roxbury, MA (US); Inna SHCHERBAKOVA, Holliston, MA (US); Cecilia Giovanna Silvia COTTA-RAMUSINO, Cambridge, MA (US); Jacob Rosenblum RUBENS, Cambridge, MA (US); Robert James CITORIK, Somerville, MA (US); Zi Jun WANG, Arlington, MA (US)

(21) Appl. No.: 17/929,124

(22) Filed: Sep. 1, 2022

Related U.S. Application Data
(63) Continuation of application No. PCT/US2021/020933, filed on Mar. 4, 2021.
(60) Provisional application No. 63/035,638, filed on Jun. 5, 2020.
(60) Provisional application No. 62/985,291, filed on Mar. 4, 2020.

(51) Int. Cl. C12N 15/10; C12N 9/22

(52) U.S. Cl. CPC C12N 15/102; C12N 9/22; C12N 2310/20

(57) ABSTRACT

Methods and compositions for modulating a target genome are disclosed.

### RELATED APPLICATIONS

[0001] This application is a continuation of International Application No. PCT/US2021/020933, filed Mar. 4, 2021, which claims priority to U.S. Ser. No. 62/985,291 filed Mar. 4, 2020, and U.S. Ser. No. 63/035,638 filed Jun. 5, 2020, the entire contents of each of which is incorporated herein by reference.

### SEQUENCE LISTING

[0002] The instant application contains a Sequence Listing which has been submitted electronically in XML file format and is hereby incorporated by reference in its entirety. Said XML copy, created on Nov. 18, 2022, is named V2065-700720_SL.xml and is 2,473,490 bytes in size.

### BACKGROUND

[0003] Integration of a nucleic acid of interest into a genome occurs at low frequency and with little site specificity, in the absence of a specialized protein to promote the insertion event. Some existing approaches, like CRISPR/Cas9, are more suited for small edits and are less effective at integrating longer sequences. Other existing approaches, like Cre/loxP, require a first step of inserting a loxP site into the genome and then a second step of inserting a sequence of interest into the loxP site. There is a need in the art for improved proteins for inserting sequences of interest into a genome.

### SUMMARY OF THE INVENTION

[0004] This disclosure relates to novel compositions, systems and methods for altering a genome at one or more locations in a host cell, tissue or subject, in vivo or in vitro. In particular, the invention features compositions, systems and methods for the introduction of exogenous genetic elements into a host genome.

[0005] Features of the compositions or methods can include one or more of the following enumerated embodiments.

1. A system for modifying DNA comprising:

[0006] (a) a polypeptide or a nucleic acid encoding a polypeptide, wherein the polypeptide comprises (i) a reverse transcriptase domain and (ii) an endonuclease domain; and

[0007] (b) a template RNA (or DNA encoding the template RNA) comprising (i) a sequence that binds the polypeptide and (ii) a heterologous object sequence, wherein the polypeptide comprises a mutation inactivating and/or deleting a nucleolar localization signal.

2. A system for modifying DNA comprising:

[0008] (a) a polypeptide or a nucleic acid encoding a polypeptide, wherein the polypeptide comprises (i) a first target DNA binding domain, e.g., comprising a first Zn finger domain, (ii) a reverse transcriptase domain, (iii) an endonuclease domain, and (iv) a second target DNA binding domain, e.g., comprising a second Zn finger domain, heterologous to the first target DNA binding domain; and

[0009] optionally (b) a template RNA (or DNA encoding the template RNA) comprising (i) a sequence that binds the polypeptide and (ii) a heterologous object sequence,

[0010] wherein (a) binds to a smaller number of target DNA sequences in a target cell than a similar polypeptide that comprises only the first target DNA binding domain, e.g., wherein the presence of the second target DNA binding domain in the polypeptide with the first DNA binding domain refines the target sequence specificity of the polypeptide relative to the polypeptide target sequence specificity of the polypeptide comprising only the first target DNA binding domain.

3. The system of embodiment 2, wherein (iii) comprises (iv).
4. A system for modifying DNA comprising:

[0011] (a) a polypeptide or a nucleic acid encoding a polypeptide, wherein the polypeptide comprises (i) a reverse transcriptase domain and (ii) an endonuclease domain; and

[0012] optionally, (b) a template RNA (or DNA encoding the template RNA) comprising (i) a sequence that binds the polypeptide and (ii) a heterologous object sequence,

[0013] wherein the system is capable of cutting the first strand of the target DNA at least twice (e.g., twice), and

[0014] optionally wherein the cuts are at least 2, 3, 4, 5, 6, 7, 8, 9, 10, 15, 20, 25, 30, 40, 50, 60, 70, 80, 90, 100, or 200 nucleotides away one another (and optionally no more than 500, 400, 300, 200, or 100 nucleotides away from one another).

5. A system for modifying DNA comprising:

[0015] (a) a polypeptide or a nucleic acid encoding a polypeptide, wherein the polypeptide comprises (i) a reverse transcriptase domain and (ii) an endonuclease domain; and

[0016] optionally, (b) a template RNA (or DNA encoding the template RNA) comprising (i) a sequence that binds the polypeptide and (ii) a heterologous object sequence,

[0017] wherein the system is capable of cutting the first strand and the second strand of the target DNA, and

[0018] wherein the distance between the cuts is the same as the distance between cuts made by the endonuclease domain, e.g., the endonuclease domain of a naturally occurring retrotransposase.

6. A system for modifying DNA comprising:

[0019] (a) a polypeptide or a nucleic acid encoding a polypeptide, wherein the polypeptide comprises (i) a reverse transcriptase domain and (ii) an endonuclease domain; and

[0020] (b) a template RNA (or DNA encoding the template RNA) comprising (i) a sequence that binds the polypeptide and (ii) a heterologous object sequence,

[0021] wherein (a), (b), or (a) and (b) further comprises a 5′ UTR and/or 3′ UTR operably linked to the sequence encoding the polypeptide, the heterologous object sequence (e.g., a coding sequence contained in the heterologous object sequence), or both.

7. The system of embodiment 6, wherein the 5′ UTR and/or 3′ UTR increase expression of the operably linked sequence(s) by at least 10%, 20%, 30%, 40%, 50%, 70%, 70%, 80%, 90%, or 100% relative to an otherwise similar nucleic acid comprising the endogenous UTR(s) associated with the heterologous object sequence or a minimal 5′ UTR and a minimal 3′ UTR.
8. A system for modifying DNA comprising:

[0022] (a) a polypeptide or a nucleic acid encoding the polypeptide, wherein the polypeptide comprises (i) a reverse transcriptase (RT) domain, (ii) a DNA-binding domain (DBD); and (iii) an endonuclease domain, e.g., a nickase domain; and

[0023] (b) a template RNA (or DNA encoding the template RNA) comprising (e.g., from 5′ to 3′) (i) optionally a sequence that binds a target site (e.g., a second strand of a site in a target genome), (ii) optionally a sequence that binds the polypeptide, (iii) a heterologous object sequence, and (iv) a 3′ target homology domain;

[0024] wherein:

[0025] (i) the polypeptide comprises a heterologous targeting domain (e.g., in the DBD or the endonuclease domain) that binds specifically to a sequence comprised in the target site; and/or

[0026] (ii) the template RNA comprises a heterologous homology sequence having at least 85%, 90%, 95%, 96%, 97%, 98%, 99%, or 100% homology to a sequence comprised in a target site.

9. A system for modifying DNA comprising:

[0027] (a) a polypeptide or a nucleic acid encoding a polypeptide, wherein the polypeptide comprises (i) a reverse transcriptase domain and (ii) an endonuclease domain; and

[0028] (b) a template RNA (or DNA encoding the template RNA) comprising (i) a sequence that binds the polypeptide, (ii) a heterologous object sequence, and (iii) a ribozyme that is heterologous to (a)(i), (a)(ii), (b)(i), or a combination thereof.

10. The system of embodiment 9, wherein the ribozyme is heterologous to (b)(i).
11. The system of embodiment 9 or 10, wherein the template RNA comprises (iv) a second ribozyme, e.g., that is endogenous to (a)(i), (a)(ii), (b)(i), or a combination thereof, e.g., wherein the second ribozyme is endogenous to (b)(i).
12. The system of embodiment 9 or 10, wherein the heterologous ribozyme replaced a ribozyme endogenous to (a)(i), (a)(ii), (b)(i), or a combination thereof, e.g., wherein the second ribozyme is endogenous to (b)(i).
13. A system for modifying DNA comprising:

[0029] optionally (a) a polypeptide or a nucleic acid encoding a polypeptide, wherein the polypeptide comprises (i) a reverse transcriptase domain and (ii) an endonuclease domain; and

[0030] (b) a template RNA (or DNA encoding the template RNA) comprising (i) a sequence that binds the polypeptide, (ii) a heterologous object sequence, (iii) a 5′ UTR capable of being cleaved into a fragment and a cleaved template RNA, wherein the 5′ UTR is optionally the sequence that binds the polypeptide,

[0031] wherein the 5′ UTR comprises one or more mutations (e.g., relative to a wildtype 5′ UTR, e.g., described herein) which increase the affinity of the fragment for the cleaved template RNA, e.g., such that the fragment hybridizes to the cleaved template RNA (e.g., the 5′ UTR of the cleaved template RNA), e.g., under stringent conditions, e.g., wherein the stringent conditions comprise hybridization in 4× sodium chloride/sodium citrate (SSC), at about 65° C., followed by a wash in 1×SSC, at about 65° C.

14. The system of embodiment 13, wherein the template RNA, e.g., the 5′ UTR, comprises a ribozyme which cleaves the template RNA (e.g., in the 5′ UTR).
15. A system for modifying DNA comprising:

[0032] (a) a polypeptide or a nucleic acid encoding a polypeptide, wherein the polypeptide comprises (i) a reverse transcriptase domain and (ii) an endonuclease domain; and

[0033] (b) a template RNA (or DNA encoding the template RNA) comprising (i) a sequence that binds the polypeptide and (ii) a heterologous object sequence,

[0034] wherein (a), (b), or (a) and (b) comprise an intron that increases the expression of the polypeptide, the heterologous object sequence (e.g., a coding sequence situated in the heterologous object sequence), or both.

16. A method of modifying a target DNA strand in a cell, tissue or subject, comprising administering a system to a cell, wherein the system comprises:

[0035] (a) a polypeptide or a nucleic acid encoding a polypeptide, wherein the polypeptide comprises (i) a reverse transcriptase domain and (ii) an endonuclease domain; and

[0036] (b) a template RNA (or DNA encoding the template RNA) comprising (i) a sequence that binds the polypeptide and (ii) a heterologous object sequence,

[0037] wherein the system reverse transcribes the template RNA sequence into the target DNA strand, thereby modifying the target DNA strand, and

[0038] wherein the cell has decreased Rad51 repair pathway activity, decreased expression of Rad51 or a component of the Rad51 repair pathway, or does not comprise a functional Rad51 repair pathway, e.g., does not comprise a functional Rad51 gene, e.g., comprises a mutation (e.g., deletion) inactivating one or both copies of the Rad51 gene or another gene in the Rad51 repair pathway.

17. A system for modifying DNA comprising:

[0039] (a) a polypeptide or a nucleic acid encoding a polypeptide, wherein the polypeptide comprises (i) a reverse transcriptase domain and (ii) an endonuclease domain; and

[0040] (b) a template RNA (or DNA encoding the template RNA) comprising (i) a sequence that binds the polypeptide and (ii) a heterologous object sequence,

[0041] wherein the heterologous object sequence comprises a sequence, e.g., a gene or fragment thereof, of any of Tables 10A-10D or 11A-11G.

18. A system for modifying DNA comprising:

[0042] (a) a polypeptide or a nucleic acid encoding a polypeptide, wherein the polypeptide comprises (i) a reverse transcriptase domain and (ii) an endonuclease domain, wherein the polypeptide is modified for enhanced activity or altered specificity; and

[0043] (b) a template RNA (or DNA encoding the template RNA) comprising (i) a sequence that binds the polypeptide and (ii) a heterologous object sequence.

19. A system for modifying DNA comprising:

[0044] (a) a polypeptide or a nucleic acid encoding a polypeptide, wherein the polypeptide comprises (i) a reverse transcriptase domain and (ii) an endonuclease domain; and

[0045] (b) a template RNA (or DNA encoding the template RNA) comprising (i) a sequence that binds the polypeptide and (ii) a heterologous object sequence, wherein the template RNA comprises one or more chemical modification selected from dihydrouridine, inosine, 7-methylguanosine, 5-methylcytidine (5mC), 5′ Phosphate ribothymidine, 2′-O-methyl ribothymidine, 2′-O-ethyl ribothymidine, 2′-fluoro ribothymidine, C-5 propynyl-deoxycytidine (pdC), C-5 propynyl-deoxyuridine (pdU), C-5 propynyl-cytidine (pC), C-5 propynyl-uridine (pU), 5-methyl cytidine, 5-methyl uridine, 5-methyl deoxycytidine, 5-methyl deoxyuridine methoxy, 2,6-diaminopurine, 5′-Dimethoxytrityl-N4-ethyl-2′-deoxycytidine, C-5 propynyl-f-cytidine (pfC), C-5 propynyl-f-uridine (pfU), 5-methyl f-cytidine, 5-methyl f-uridine, C-5 propynyl-m-cytidine (pmC), C-5 propynyl-f-uridine (pmU), 5-methyl m-cytidine, 5-methyl m-uridine, LNA (locked nucleic acid), MGB (minor groove binder) pseudouridine (Ψ), 1-N-methylpseudouridine (1-Me-Ψ), or 5-methoxyuridine (5-MO-U).

20. A system for modifying DNA comprising:

[0046] (a) a polypeptide or a nucleic acid encoding a polypeptide, wherein the polypeptide comprises (i) a target DNA binding domain, (ii) a reverse transcriptase domain, optionally (iii) an endonuclease domain, wherein the polypeptide comprises a heterologous linker replacing a portion of (i), (ii), or (iii), or replacing an endogenous linker connecting two of (i), (ii), or (iii); and

[0047] optionally (b) a template RNA (or DNA encoding the template RNA) comprising (i) a sequence that binds the polypeptide and (ii) a heterologous object sequence.

21. A system for modifying DNA comprising:

[0048] (a) a polypeptide or a nucleic acid encoding a polypeptide, wherein the polypeptide comprises (i) a reverse transcriptase domain and (ii) an endonuclease domain; and

[0049] (b) a template RNA (or DNA encoding the template RNA) comprising (i) a sequence that binds the polypeptide, (ii) a heterologous object sequence, (iii) a first homology domain having at least 5 or at least 10 bases of 100% identity to a target DNA strand, at the 5′ end of the template RNA, and (iv) a second homology domain having at least 5 or at least 10 bases of 100% identity to a target DNA strand, at the 3′ end of the template RNA.

22. The system of any preceding embodiments, wherein the polypeptide comprises a mutation inactivating and/or deleting a nucleolar localization signal.
23. The system of embodiment 22, wherein activity of the nucleolar localization signal is reduced by at least 50%, 60%, 70%, 80%, 90%, 95%, or 99%.
24. The system of either of embodiments 22 or 23, wherein the polypeptide comprises a nuclear localization signal (NLS), e.g., an endogenous NLS or an exogenous NLS.
25. The system of any preceding embodiments, wherein the polypeptide of (a) comprises a target DNA binding domain (e.g., the endonuclease domain comprises a target DNA binding domain), e.g., a first target DNA binding domain, or (a) further comprises a target DNA binding domain, e.g., a first target binding domain.
26. The system of embodiment 25, wherein:

[0050] the polypeptide of (a) further comprises a second target DNA binding domain, e.g., a Zn finger domain, that is heterologous, e.g., to the first target DNA binding domain or to the endonuclease domain.

27. The system of embodiment 26, wherein the endonuclease domain comprises the second target DNA binding domain.
28. The system of embodiment 26 or 27, wherein the second target DNA binding domain affects the endonuclease activity of the polypeptide.
29. The system of any preceding embodiments, wherein the second target DNA binding domain affects DNA nicking activity of the polypeptide.
30. The system of any preceding embodiments, wherein the second target DNA binding domain binds a locus provided in Table E3.
31. The system of any preceding embodiments, wherein the locus in Table E3 has a genomic score of at least 6.
32. The system of any preceding embodiments, wherein the polypeptide of (a) binds to a smaller number of target DNA sequences than a similar polypeptide that comprises only the first target DNA binding domain or the second target DNA binding domain, e.g., wherein the presence of the second target DNA binding domain in the polypeptide with the first target DNA binding domain refines the target sequence specificity of the polypeptide relative to the polypeptide target sequence specificity of the polypeptide comprising only the first target DNA binding domain.
33. The system of any preceding embodiments, wherein the second target DNA binding domain binds to a genomic DNA sequence that is less than 100, 90, 80, 70, 60, 50, 40, 30, 20, 15, 10, 9, 8, 7, 6, 5, 4, 3, 2, or 1 nucleotides away from a genomic sequence to which the first target DNA binding domain binds.
34. The system of any preceding embodiments, wherein the second target DNA binding domain binds to a genomic DNA sequence that is 1-100, 1-90, 1-80, 1-70, 1-60, 1-50, 1-40, 1-30, 1-20, 1-10, 1-5, 5-100, 5-90, 5-80, 5-70, 5-60, 5-50, 5-40, 5-30, 5-20, 5-10, 10-100, 10-90, 10-80, 10-70, 10-60, 10-50, 10-40, 10-30, 10-20, 20-100, 20-90, 20-80, 20-70, 20-60, 20-50, 20-40, 20-30, 30-100, 30-90, 30-80, 30-70, 30-60, 30-50, 30-40, 40-100, 40-90, 40-80, 40-70, 40-60, 40-50, 50-100, 50-90, 50-80, 50-70, 50-60, 60-100, 60-90, 60-80, 60-70, 70-100, 70-90, 70-80, 80-100, 80-90, or 90-100 nucleotides away from a genomic sequence to which the first target DNA binding domain binds.
35. The system of any preceding embodiments, wherein the first or second target DNA binding domain comprises a CRISPR/Cas protein, a TAL Effector domain, a Zn finger domain, or a meganuclease domain.
36. The system of any preceding embodiments, wherein the first target DNA binding domain comprises a CRISPR/Cas protein and the second target DNA binding domain comprises a TAL effector domain.
37. The system of any preceding embodiments, wherein the first target DNA binding domain comprises a CRISPR/Cas protein and the second target DNA binding domain comprises a Zn finger domain.
38. The system of any preceding embodiments, wherein the first target DNA binding domain comprises a CRISPR/Cas protein and the second target DNA binding domain comprises a CRISPR/Cas protein.
39. The system of any preceding embodiments, wherein the first target DNA binding domain comprises a CRISPR/Cas protein and the second target DNA binding domain comprises a meganuclease domain.
40. The system of any preceding embodiments, wherein the first target DNA binding domain comprises a TAL effector domain and the second target DNA binding domain comprises a Zn finger domain.
41. The system of any preceding embodiments, wherein the first target DNA binding domain comprises a TAL effector domain and the second target DNA binding domain comprises a TAL effector domain.
42. The system of any preceding embodiments, wherein the first target DNA binding domain comprises a TAL effector domain and the second target DNA binding domain comprises a meganuclease domain.
43. The system of any preceding embodiments, wherein the first target DNA binding domain comprises a Zn finger domain and the second target DNA binding domain comprises a Zn finger domain.
44. The system of any preceding embodiments, wherein the first target DNA binding domain comprises a Zn finger domain and the second target DNA binding domain comprises a meganuclease domain.
45. The system of any preceding embodiments, wherein the second DNA binding domain binds to a sequence in a genomic safe harbor (GSH) site or a genomic Natural Harbor™ site.
46. The system of any preceding embodiments, wherein the system is capable of cutting the first strand of the target DNA and the second strand of the target DNA, e.g., wherein the cuts are at least 2, 3, 4, 5, 6, 7, 8, 9, 10, 15, 20, 25, 30, 40, 50, 60, 70, 80, 90, 100, or 200 nucleotides away from one another (and optionally no more than 500, 400, 300, 200, or 100 nucleotides away from one another).
47. The system of any preceding embodiments, wherein the system is capable of cutting the first strand of the target DNA at least twice (e.g., twice), e.g., wherein the cuts are at least 2, 3, 4, 5, 6, 7, 8, 9, 10, 15, 20, 25, 30, 40, 50, 60, 70, 80, 90, 100, or 200 nucleotides away from one another (and optionally no more than 500, 400, 300, 200, or 100 nucleotides away from one another).
48. The system of any preceding embodiments, wherein the cuts are 1-500, 1-400, 1-300, 1-200, 1-100, 1-90, 1-80, 1-70, 1-60, 1-50, 1-40, 1-30, 1-20, 1-10, 1-5, 5-500, 5-400, 5-300, 5-200, 5-100, 5-90, 5-80, 5-70, 5-60, 5-50, 5-40, 5-30, 5-20, 5-10, 10-500, 10-400, 10-300, 10-200, 10-100, 10-90, 10-80, 10-70, 10-60, 10-50, 10-40, 10-30, 10-20, 20-500, 20-400, 20-300, 20-200, 20-100, 20-90, 20-80, 20-70, 20-60, 20-50, 20-40, 20-30, 30-500, 30-400, 30-300, 30-200, 30-100, 30-90, 30-80, 30-70, 30-60, 30-50, 30-40, 40-500, 40-400, 40-300, 40-200, 40-100, 40-90, 40-80, 40-70, 40-60, 40-50, 50-500, 50-400, 50-300, 50-200, 50-100, 50-90, 50-80, 50-70, 50-60, 60-500, 60-400, 60-300, 60-200, 60-100, 60-90, 60-80, 60-70, 70-500, 70-400, 70-300, 70-200, 70-100, 70-90, 70-80, 80-500, 80-400, 80-300, 80-200, 80-100, 80-90, 90-500, 90-400, 90-300, 90-200, 90-100, 100-500, 100-400, 100-300, 100-200, 200-500, 200-400, 200-300, 300-500, 300-400, or 400-500 nucleotides away from one another.
49. The system of any preceding embodiments, wherein the distance between the cuts is the same as the distance between cuts made by the endonuclease domain, e.g., the endonuclease domain of a naturally occurring retrotransposase.
50. The system of any preceding embodiments, wherein the two cuts are both made by the same endonuclease domain (e.g., a CRISPR/Cas protein, e.g., directed by a plurality of gRNAs, e.g., disposed in the template RNA).
51. The system of any preceding embodiments, wherein the polypeptide further comprises a second endonuclease domain.
52. The system of any preceding embodiments, wherein:

[0051] i) the first endonuclease domain (e.g., nickase) cuts the to-be-edited strand of the target DNA and the second endonuclease domain (e.g., nickase) cuts the non-edited strand of the target DNA, or

[0052] ii) the first endonuclease domain (e.g., nickase) makes one of the two cuts to the to-be-edited strand of the target DNA and the second endonuclease domain (e.g., nickase) makes the other cut to the to-be-edited strand of the target DNA.

53. The system of any preceding embodiments, wherein (a), (b), or (a) and (b) further comprises a 5′ UTR and/or 3′ UTR operably linked to the sequence encoding the polypeptide, the heterologous object sequence (e.g., a coding sequence contained in the heterologous object sequence), or both, wherein the 5′ UTR and/or 3′ UTR increase expression of the operably linked sequence(s).
54. The system of preceding embodiment, wherein the 5′ UTR and/or 3′ UTR:

[0053] increase the stability, e.g., half-life, of the template RNA, an RNA transcribed from (a), or both; and/or

[0054] increases the efficiency of translation of the heterologous object sequence, the polypeptide, or both.

55. The system of preceding embodiment, wherein the 5′ UTR comprises a 5′ UTR from 30 complement factor 3 (C3) or a functional fragment or variant thereof.
56. The system of any preceding embodiments, wherein the 3′ UTR comprises a 3′ UTR from orosomucoid 1 (ORM1) or a functional fragment or variant thereof.
57. The system of any preceding embodiments, wherein

[0055] i) the 5′ UTR increases the rate of translation, e.g., relative to an otherwise similar nucleic acid comprising the endogenous UTR(s) associated with the heterologous object sequence or a minimal 5′ UTR and a minimal 3′ UTR,

[0056] ii) the 3′ UTR increases nucleic acid half-life, e.g., relative to an otherwise similar nucleic acid comprising the endogenous UTR(s) associated with the heterologous object sequence or a minimal 5′ UTR and a minimal 3′ UTR, or

[0057] iii) both i) and ii).

58. The system of any preceding embodiments, wherein the template RNA comprises a ribozyme that is heterologous to (a)(i), (a)(ii), (b)(i), or a combination thereof.
59. The system of any preceding embodiments, wherein the heterologous ribozyme replaced a ribozyme endogenous to (a)(i), (a)(ii), (b)(i), or a combination thereof.
60. The system of any preceding embodiments, wherein the template RNA comprises a second ribozyme, e.g., that is endogenous to (a)(i), (a)(ii), (b)(i), or a combination thereof.
61. The system of any preceding embodiments, wherein the heterologous ribozyme is situated in a 5′ UTR or 3′ UTR of the template RNA.
62. The system of any preceding embodiments, wherein the heterologous ribozyme is 5′ of the heterologous object sequence or 3′ of the heterologous object sequence.
63. The system of any preceding embodiments, wherein the heterologous ribozyme is capable of cleaving RNA comprising the ribozyme, e.g., 5′ of the ribozyme, 3′ of the ribozyme, or within the ribozyme.
64. The system of any preceding embodiments, wherein the heterologous ribozyme is 5′ of the heterologous object sequence and cleaves 3′ of the heterologous ribozyme, e.g., wherein the heterologous ribozyme is a synthetic or naturally occurring hammerhead ribozyme.
65. The system of any preceding embodiments, wherein the heterologous ribozyme is 3′ of the heterologous object sequence and cleaves 5′ of the heterologous ribozyme, e.g., wherein the heterologous ribozyme is chosen from an HDV family ribozyme or a hatchet ribozyme.
66. The system of any preceding embodiments, wherein the template RNA further comprises a ribozyme-hybridizing region, e.g., a template with altered targeting, such as through a homology arm, comprises a modified 5′ UTR comprising the ribozyme-hybridizing region.
67. The system of any preceding embodiments, wherein a portion of the ribozyme hybridizes (e.g. via Watson-crick basepairing) to sequence 5′ or 3′ of the ribozyme.
68. The system of any preceding embodiments, wherein the ribozyme sequence is altered from its natural sequence by at least 1, 2, 3, 4, 5, 6, 8, 9, 10, 15, 20, 25 or more basepairs.
69. The system of any preceding embodiments, wherein the ribozyme sequence is altered from its natural sequence in order to hybridize to a homology arm that is 5′ or 3′ of the target ribozyme
70. The system of any preceding embodiments, wherein the system integrates a heterologous object sequence into a target genome with a greater efficiency than an otherwise similar system lacking the heterologous ribozyme, e.g., wherein at least 10%, 20%, 30%, 405, 50%, 60%, 70%, 80%, 90%, or 100% more cells show integration in the presence of the system comprising the heterologous ribozyme compared to the system lacking the heterologous ribozyme.
71. The system of any preceding embodiments, wherein the template RNA comprises a 5′ UTR capable of being cleaved into a fragment and a cleaved template RNA.
72. The system of any preceding embodiments, wherein the template RNA comprises a ribozyme which cleaves the template RNA, e.g., in the 5′ UTR.
73. The system of any preceding embodiments, wherein the 5′ UTR comprises one or more mutations (e.g., relative to a wildtype 5′ UTR described herein, e.g., in Tables 1 or 3, or from a protein domain listed in Table 2).
74. The system of any preceding embodiments, wherein the one or more mutations increase the affinity of the fragment for the cleaved template RNA, e.g., such that the fragment hybridizes to the cleaved template RNA (e.g., the 5′ UTR of the cleaved template RNA) under stringent conditions, e.g., wherein the stringent conditions for hybridization includes hybridization in 4× sodium chloride/sodium citrate (SSC), at about 65° C., followed by a wash in 1×SSC, at about 65° C.
76. The system of any preceding embodiments, wherein (a), (b), or (a) and (b) comprise an intron that increases the expression of the polypeptide, the heterologous object sequence (e.g., a coding sequence situated in the heterologous object sequence), or both.
77. The system of any preceding embodiments, wherein the intron is operably linked (e.g., to be recognized by cellular splicing proteins) to the sequence encoding the polypeptide, the heterologous object sequence (e.g., a coding sequence situated in the heterologous object sequence), or both.
78. The system of any preceding embodiments, wherein the intron is situated in a 5′ UTR (e.g., 5′ of the heterologous object sequence).
79. The system of any preceding embodiments, wherein the intron is situated in a coding sequence of the heterologous object sequence.
80. The system of any preceding embodiments, wherein the intron is situated in the forward direction in relation to the coding sequence of the heterologous object sequence.
81. The system of any preceding embodiments, wherein the intron is situated in the reverse direction in relation to the coding sequence of the heterologous object sequence.
82. The system of any preceding embodiment, wherein the intron is spliced after transcription of the template RNA and before target primed reverse transcription into target, e.g., genomic, DNA.
83. The system of any preceding embodiments, wherein the intron is spliced after transcription of the heterologous object sequence after the heterologous object sequence is integrated in the target, e.g., genomic, DNA.
84. The system of any preceding embodiments, wherein the intron comprises a microRNA binding site.
85. The system of any of the preceding embodiments, wherein the enonuclease domain (e.g., an endonuclease domain of R2Tg or R2-1_ZA) recognizes a motif (e.g., GG or AAGG, TAAGGT, or TTAAGGTAGC (SEQ ID NO: 2007), and the heterologous DNA binding domain recognizes a genomic DNA sequence, wherein the motif and the genomic DNA sequence are within 10-20, 20-30, 30-40, 40-50, 50-60, 60-70, 70-80, 80-100, 100-150, 150-200, or 200-250 nucleotides of each other, optionally wherein the motif recognized by the endonuclease domain comprises 4, 5, 6, 7, 8, 9, or 10 consecutive nucleotides of TTAAGGTAGC (SEQ ID NO: 2007), AAGGTAGCCAAA (SEQ ID NO: 2008), or TAAGGTAGCCAAA (SEQ ID NO: 2009), or wherein the motif recognized by the endonuclease domain comprises 2 or 3 consecutive nucleotides of AAGG.
86. The system of any preceding embodiments, wherein the motif is upstream of the genomic DNA sequence, e.g., the motif is about 30-80, 40-70, 50-60, or 55 nt upstream of the genomic DNA sequence.
87. The system of any preceding embodiments, wherein the motif is downstream of the genomic DNA sequence, e.g., the motif is about 10-30, 15-25, or 20 nt downstream of the genomic DNA sequence.
88. The system of any preceding embodiments, wherein the motif is in the same orientation as the genomic DNA sequence or in the reverse complement orientation as the genomic DNA sequence.
89. The system of any preceding embodiments, wherein the heterologous DNA binding domain (e.g., a zinc finger domain) is N-terminal or C-terminal of the endonuclease domain.
90. The system of any preceding embodiments, wherein a linker (e.g., a linker of Table 38) is disposed between the heterologous DNA binding domain and the endonuclease domain.
91. The system any of the preceding embodiments, wherein the system comprises one or more circular RNA molecules (circRNAs).
92. The system of any preceding embodiments, wherein the circRNA encodes the Gene Writer polypeptide.
93. The system of any preceding embodiments, wherein the circRNA comprises a template RNA.
94. The system of any preceding embodiments, wherein circRNA is delivered to a host cell.
95. The system of any of the preceding embodiments, wherein the circRNA is capable of being linearized, e.g., in a host cell, e.g., in the nucleus of the host cell.
95. The system of any of the preceding embodiments, wherein the circRNA comprises a cleavage site.
97. The system of any preceding embodiments, wherein the circRNA further comprises a second cleavage site.
98. The system of any preceding embodiments, wherein the cleavage site can be cleaved by a ribozyme, e.g., a ribozyme comprised in the circRNA (e.g., by autocleavage).
99. The system of any of the preceding embodiments, wherein the circRNA comprises a ribozyme sequence.
100. The system of any preceding embodiments, wherein the ribozyme sequence is capable of autocleavage, e.g., in a host cell, e.g., in the nucleus of the host cell.
101. The system of any preceding embodiments, wherein the ribozyme is an inducible ribozyme.
102. The system of any preceding embodiments, wherein the ribozyme is a protein-responsive ribozyme, e.g., a ribozyme responsive to a nuclear protein, e.g., a genome-interacting protein, e.g., an epigenetic modifier, e.g., EZH2.
103. The system of any preceding embodiments, wherein the ribozyme is a nucleic acid-responsive ribozyme.
104. The system of any preceding embodiments, wherein the catalytic activity (e.g., autocatalytic activity) of the ribozyme is activated in the presence of a target nucleic acid molecule (e.g., an RNA molecule, e.g., an mRNA, miRNA, ncRNA, lncRNA, tRNA, snRNA, or mtRNA).
105. The system of any preceding embodiments, wherein the ribozyme is responsive to a target protein (e.g., an MS2 coat protein).
106. The system of any preceding embodiments, wherein the target protein localized to the cytoplasm or localized to the nucleus (e.g., an epigenetic modifier or a transcription factor).
107. The system of any preceding embodiments, wherein the ribozyme comprises the ribozyme sequence of a B2 or ALU retrotransposon, or a nucleic acid sequence having at least 85%, 90%, 95%, 96%, 97%, 98%, or 99% sequence identity thereto.
108. The system of any preceding embodiments, wherein the ribozyme comprises the sequence of a tobacco ringspot virus hammerhead ribozyme, or a nucleic acid sequence having at least 85%, 90%, 95%, 96%, 97%, 98%, or 99% sequence identity thereto.
109. The system of any preceding embodiments, wherein the ribozyme comprises the sequence of a hepatitis delta virus (HDV) ribozyme, or a nucleic acid sequence having at least 85%, 90%, 95%, 96%, 97%, 98%, or 99% sequence identity thereto.
110. The system of any preceding embodiments, wherein the ribozyme is activated by a moiety expressed in a target cell or target tissue.
111. The system of any preceding embodiments, wherein the ribozyme is activated by a moiety expressed in a target subcellular compartment (e.g., a nucleus, nucleolus, cytoplasm, or mitochondria).
112. The system of any of the preceding embodiments, wherein the ribozyme is comprised in a circular RNA or a linear RNA.
113. A system comprising a first circular RNA encoding the polypeptide of a Gene Writing system; and

[0058] a second circular RNA comprising the template RNA of a Gene Writing system.

114. The system of any of the preceding embodiments, wherein the template RNA, e.g., the 5′ UTR, comprises a ribozyme which cleaves the template RNA (e.g., in the 5′ UTR).
115. The system of any of the preceding embodiments, wherein the template RNA comprises a ribozyme that is heterologous to (a)(i) (the a reverse transcriptase domain), (a)(ii) (the endonuclease domain), (b)(i) (a sequence of the template RNA that binds the polypeptide), or a combination thereof.
116. The system of any of the preceding embodiments, wherein the heterologous ribozyme is capable of cleaving RNA comprising the ribozyme, e.g., 5′ of the ribozyme, 3′ of the ribozyme, or within the ribozyme.
117. A lipid nanoparticle (LNP) comprising the system, polypeptide (or RNA encoding the same), nucleic acid molecule, or DNA encoding the system or polypeptide, of any preceding embodiment.
118. A system comprising a first lipid nanoparticle comprising the polypeptide (or DNA or RNA encoding the same) of a Gene Writing system (e.g., as described herein); and a second lipid nanoparticle comprising a nucleic acid molecule of a Gene Writing System (e.g., as described herein).
119. The system, kit, polypeptide, or reaction mixture of any preceding embodiments, wherein the system, nucleic acid molecule, polypeptide, and/or DNA encoding the same, is formulated as a lipid nanoparticle (LNP).
120. The LNP of any preceding embodiments, comprising a cationic lipid.
121. The LNP of any preceding embodiments wherein the cationic lipid having a following structure:

[chemical structure]

122. The LNP of any any preceding embodiments, further comprising one or more neutral lipid, e.g., DSPC, DPPC, DMPC, DOPC, POPC, DOPE, SM, a steroid, e.g., cholesterol, and/or one or more polymer conjugated lipid, e.g., a pegylated lipid, e.g., PEG-DAG, PEG-PE, PEG-S-DAG, PEG-cer or a PEG dialkyoxypropylcarbamate.
123. The system, kit, or polypeptide, of any of the preceding embodiments, wherein the system, polypeptide, and/or DNA encoding the same, is formulated as a lipid nanoparticle (LNP).
124. The system, kit, or polypeptide of embodiment M1, wherein the lipid nanoparticle (or a formulation comprising a plurality of the lipid nanoparticles) lacks reactive impurities (e.g., aldehydes), or comprises less than a preselected level of reactive impurities (e.g., aldehydes).
125. The system, kit, or polypeptide of embodiment M1, wherein the lipid nanoparticle (or a formulation comprising a plurality of the lipid nanoparticles) lacks aldehydes, or comprises less than a preselected level of aldehydes.
126. The system, kit, or polypeptide of any preceding embodiments, wherein the lipid nanoparticle is comprised in a formulation comprising a plurality of the lipid nanoparticles.
127. The system, kit, or polypeptide of any preceding embodiments, wherein the lipid nanoparticle formulation is produced using one or more lipid reagents comprising less than 5%, 4%, 3%, 2%, 1%, 0.9%, 0.8%, 0.7%, 0.6%, 0.5%, 0.4%, 0.3%, 0.2%, or 0.1% total reactive impurity (e.g., aldehyde) content.
128. The system, kit, or polypeptide of any preceding embodiments, wherein the lipid nanoparticle formulation is produced using one or more lipid reagents comprising less than 3% total reactive impurity (e.g., aldehyde) content.
128. The system, kit, or polypeptide of any preceding embodiments, wherein the lipid nanoparticle formulation is produced using one or more lipid reagents comprising less than 5%, 4%, 3%, 2%, 1%, 0.9%, 0.8%, 0.7%, 0.6%, 0.5%, 0.4%, 0.3%, 0.2%, or 0.1% of any single reactive impurity (e.g., aldehyde) species.
129. The system, kit, or polypeptide of any preceding embodiments, wherein the lipid nanoparticle formulation is produced using one or more lipid reagent comprising less than 0.3% of any single reactive impurity (e.g., aldehyde) species.
130. The system, kit, or polypeptide of any preceding embodiments, wherein the lipid nanoparticle formulation is produced using one or more lipid reagents comprising less than 0.1% of any single reactive impurity (e.g., aldehyde) species.
131. The system, kit, or polypeptide of any any preceding embodiments, wherein the lipid nanoparticle formulation comprises less than 5%, 4%, 3%, 2%, 1%, 0.9%, 0.8%, 0.7%, 0.6%, 0.5%, 0.4%, 0.3%, 0.2%, or 0.1% total reactive impurity (e.g., aldehyde) content.
132. The system, kit, or polypeptide of any preceding embodiments, wherein the lipid nanoparticle formulation comprises less than 3% total reactive impurity (e.g., aldehyde) content.
133. The system, kit, or polypeptide of any preceding embodiments, wherein the lipid nanoparticle formulation comprises less than 5%, 4%, 3%, 2%, 1%, 0.9%, 0.8%, 0.7%, 0.6%, 0.5%, 0.4%, 0.3%, 0.2%, or 0.1% of any single reactive impurity (e.g., aldehyde) species.
134. The system, kit, or polypeptide of any preceding embodiments, wherein the lipid nanoparticle formulation comprises less than 0.3% of any single reactive impurity (e.g., aldehyde) species.
135. The system, kit, or polypeptide of any preceding embodiments, wherein the lipid nanoparticle formulation comprises less than 0.1% of any single reactive impurity (e.g., aldehyde) species.
136. The system, kit, or polypeptide of any preceding embodiments, wherein one or more, or optionally all, of the lipid reagents used for a lipid nanoparticle as described herein or a formulation thereof comprise less than 5%, 4%, 3%, 2%, 1%, 0.9%, 0.8%, 0.7%, 0.6%, 0.5%, 0.4%, 0.3%, 0.2%, or 0.1% total reactive impurity (e.g., aldehyde) content.
137. The system, kit, or polypeptide of any preceding embodiments, wherein one or more, or optionally all, of the lipid reagents used for a lipid nanoparticle as described herein or a formulation thereof comprise less than 3% total reactive impurity (e.g., aldehyde) content.
138. The system, kit, or polypeptide of any preceding embodiments, wherein one or more, or optionally all, of the lipid reagents used for a lipid nanoparticle as described herein or a formulation thereof comprise less than 5%, 4%, 3%, 2%, 1%, 0.9%, 0.8%, 0.7%, 0.6%, 0.5%, 0.4%, 0.3%, 0.2%, or 0.1% of any single reactive impurity (e.g., aldehyde) species.
139. The system, kit, or polypeptide of any preceding embodiments, wherein one or more, or optionally all, of the lipid reagents used for a lipid nanoparticle as described herein or a formulation thereof comprise less than 0.3% of any single reactive impurity (e.g., aldehyde) species.
140. The system, kit, or polypeptide of any preceding embodiments, wherein one or more, or optionally all, of the lipid reagents used for a lipid nanoparticle as described herein or a formulation thereof comprise less than 0.1% of any single reactive impurity (e.g., aldehyde) species.
141. The system, kit, or polypeptide of any preceding embodiments, wherein the total aldehyde content and/or quantity of any single reactive impurity (e.g., aldehyde) species is determined by liquid chromatography (LC), e.g., coupled with tandem mass spectrometry (MS/MS), e.g., according to the method described in Example 26.
142. The system, kit, or polypeptide of any preceding embodiments, wherein the total aldehyde content and/or quantity of reactive impurity (e.g., aldehyde) species is determined by detecting one or more chemical modifications of a nucleic acid molecule (e.g., as described herein) associated with the presence of reactive impurities (e.g., aldehydes), e.g., in the lipid reagents.
143. The system, kit, or polypeptide of any preceding embodiments, wherein the total aldehyde content and/or quantity of aldehyde species is determined by detecting one or more chemical modifications of a nucleotide or nucleoside (e.g., a ribonucleotide or ribonucleoside, e.g., comprised in or isolated from a nucleic acid molecule, e.g., as described herein) associated with the presence of reactive impurities (e.g., aldehydes), e.g., in the lipid reagents, e.g., as described in Example 27.
144. The system, kit, or polypeptide of embodiment M21, wherein the chemical modifications of a nucleic acid molecule, nucleotide, or nucleoside are detected by determining the presence of one or more modified nucleotides or nucleosides, e.g., using LC-MS/MS analysis, e.g., as described in Example 27.
145. A method of modifying a target DNA strand in a cell, tissue or subject, comprising administering any preceding numbered system to the cell, tissue or subject, wherein the system reverse transcribes the template RNA sequence into the target DNA strand, thereby modifying the target DNA strand, and wherein the cell has decreased Rad51 repair pathway activity, decreased expression of Rad51 or a component of the Rad51 repair pathway, or does not comprise a functional Rad51 repair pathway, e.g., does not comprise a functional Rad51 gene, e.g., comprises a mutation (e.g., deletion) inactivating one or both copies of the Rad51 gene or another gene in the Rad51 repair pathway.
146. A host cell (e.g., a mammalian cell, e.g., a human cell) comprising any preceding numbered system, wherein the host cell has decreased Rad51 repair pathway activity, decreased expression of Rad51 or a component of the Rad51 repair pathway, or does not comprise a functional Rad51 repair pathway, e.g., does not comprise a functional Rad51 gene, e.g., comprises a mutation (e.g., deletion) inactivating one or both copies of the Rad51 gene or another gene in the Rad51 repair pathway.
147. The system of any preceding embodiments, wherein the polypeptide binds a promoter region, a 5′ UTR region, an exon, an intron, or a 3′ UTR region of a sequence, e.g., a gene or fragment thereof, of any of Tables 10A-10D or 11A-11G.
148. The system of any preceding embodiments, wherein the polypeptide further comprises a heterologous linker replacing a portion of (i) a target DNA binding domain, (ii) a reverse transcriptase domain, optionally (iii) an endonuclease domain, or replacing an endogenous linker connecting two of (i), (ii), or (iii), wherein optionally the linker is a linker of Table 38.
149. The system of any preceding embodiments, wherein the heterologous linker replaces, e.g., deletes, a portion of (i).
150. The system of any preceding embodiments, wherein the heterologous linker replaces, e.g., deletes, a portion of (ii).
151. The system of any preceding embodiments, wherein the heterologous linker replaces, e.g., deletes, a portion of (iii).
152. The system of any preceding embodiments, wherein the heterologous linker replaces, e.g., deletes, a portion of (i) and (ii).
153. The system of any preceding embodiments, wherein the heterologous linker replaces, e.g., deletes, a portion of (i) and (iii).
154. The system of any preceding embodiments, wherein the heterologous linker replaces, e.g., deletes, a portion of (ii) and (iii).
155. The system of any preceding embodiments, wherein the heterologous linker replaces, e.g., deletes, the endogenous linker connecting (i) and (ii).
156. The system of any preceding embodiments, wherein the heterologous linker replaces, e.g., deletes, the endogenous linker connecting (i) and (iii).
157. The system of any preceding embodiments, wherein the heterologous linker replaces, e.g., deletes, the endogenous linker connecting (ii) and (iii).
158. The system of any preceding embodiments, wherein the heterologous linker comprises an amino acid sequence having at least 70%, 75%, 80%, 85%, 90%, 95%, 96%, 97%, 98%, 99%, or 100% sequence identity to the amino acid sequence SGSETPGTSESATPES (SEQ ID NO: 1023) or GGGS (SEQ ID NO: 1024).
159. The system of any preceding embodiments, wherein the heterologous linker comprises at least 1, 2, 3, 4, 5, 6, 7, 8, 9, 10, 11, 12, 13, 14, 15, 16, 17, 18, 19, 20, 25, 30, 35, 40, 45, 50, 60, 70, 80, 90, 100, 125, 150, 200, 300, 400, or 500 amino acids.
160. The method of any of the preceding embodiments, wherein the tissue is liver, lung, skin, muscle tissue (e.g., skeletal muscle), eye or ocular tissue, blood, blood cells, immune cells, or central nervous system.
161, The method of any of the preceding embodiments, wherein the cell is a hematopoietic stem cell (HSC), a T-cell, a B cell, or a Natural Killer (NK) cell.
162. The method of any of the preceding embodiments, wherein the cell is a fibroblast.
163. The method of any of the preceding embodiments, wherein the cell is a primary cell.
164. The method of any of the preceding embodiments, where in the cell is not immortalized.
165. The system of any of the preceding embodiments, wherein (a) comprises RNA and (b) comprises RNA.
166. The system of any of the preceding embodiments, wherein (a) and (b) are part of the same nucleic acid.
167. The system of any preceding embodiments, wherein (a) and (b) are separate nucleic acids.
168. The system of any of the preceding embodiments, which comprises only RNA, or which comprises more RNA than DNA by an RNA:DNA ratio of at least 10:1, 20:1, 30:1, 40:1, 50:1, 60:1, 70:1, 80:1, 90:1, or 100:1.
169. The system of any preceding embodiments, wherein the heterologous object sequence comprises an open reading frame in a 5′ to 3′ orientation on the template RNA.
170. The system of any preceding embodiments, wherein the heterologous object sequence comprises an open reading frame in a 3′ to 5′ orientation on the template RNA.
171. The system of any of the preceding embodiments, wherein the sequence that binds the polypeptide is a 3′ untranslated sequence.
172. The system of any preceding embodiments, wherein the template RNA further comprises a 5′ untranslated sequence.
173. The system of any of the preceding embodiments, wherein the template RNA further comprises a promoter operably linked to the heterologous object sequence, e.g., the heterologous object sequence can, in some embodiment, comprise a promoter operably linked to a sequence, such as a protein coding sequence.
174. The system of any preceding embodiments, wherein the promoter is disposed between the 5′ untranslated sequence and the heterologous object sequence.
175. The system of any preceding embodiments, wherein the promoter is disposed between the 3′ untranslated sequence that binds the polypeptide and the heterologous object sequence.
176. The system of any any preceding embodiments, wherein the 5′ untranslated sequence is a sequence of column 5 of Table 3, or a sequence having at least 80% identity thereto.
177. The system of any any preceding embodiments, wherein the 3′ untranslated sequence is a sequence of column 6 of Table 3, or a sequence having at least 80% identity thereto.
178. The system of any of the preceding embodiments, wherein the heterologous object sequence comprises an enzyme, a membrane protein, a blood factor, an intracellular protein, an extracellular protein, a structural protein, a signaling protein, a regulatory protein, a transport protein, a sensory protein, a motor protein, a defense protein, a storage protein, an immune receptor protein, (e.g. a synthetic immune receptor protein such as a chimeric antigen receptor protein (CAR), a T cell receptor, a B cell receptor), or an antibody.
179. The system of any of the preceding embodiments, wherein the template RNA comprises at least 5 based or at least 10 bases of 100% identity to a target DNA strand, at the 5′ end of the template RNA.
180. The system of any of the preceding embodiments, wherein the template RNA comprises at least 5 bases or at least 10 bases of 100% identity to a target DNA strand, at the 3′ end of the template RNA.
181. A method of modifying a target DNA strand in a cell, tissue, or subject, comprising administering the system of any preceding embodiments to the cell, tissue, or subject, thereby modifying the target DNA strand.
182. The method of any preceding embodiments, which results in the addition of at least 5 base pairs of exogenous DNA sequence to the genome of the cell.
183. The method of any preceding embodiments, which results in the addition of at least 100 base pairs of exogenous DNA sequence to the genome of the cell.
184. The method of any preceding embodiments, which results in insertion of the heterologous object sequence into the target DNA at an average copy number of at least 0.01, 0.05, or 0.5 copies per genome.
185. The method of any preceding embodiments, which results in about 50-100% of insertions of the heterologous object sequence into the target DNA being non-truncated.
186. The method of any preceding embodiments, wherein the nucleic acid of (a) is not integrated into the genome of the cell.
187. The method of any preceding embodiments, wherein the template RNA comprises at least 5 or at least 10 bases of 100% identity to the target DNA strand, at the 5′ end of the template RNA.
188. The method of any of any preceding embodiments, wherein the template RNA comprises at least 5 or at least 10 bases of 100% identity to the target DNA strand, at the 3′ end of the template RNA.
189. The system or method of any preceding embodiments, wherein the heterologous object sequence encodes a therapeutic polypeptide or that encodes a mammalian (e.g., human) polypeptide, or a fragment or variant thereof.
190. The system or method of any preceding embodiments, wherein one or more of:
[0059] i. the heterologous object sequence encodes a protein, e.g. an enzyme (e.g., a lysosomal enzyme) or a blood factor (e.g., Factor I, II, V, VII, X, XI, XII or XIII);
[0060] ii. the heterologous object sequence comprises a tissue specific promoter or enhancer;
[0061] iii. the heterologous object sequence encodes a polypeptide of greater than 250, 300, 400, 500, or 1,000 amino acids, and optionally up to 7,500 amino acids;
[0062] iv. the heterologous object sequence encodes a fragment of a mammalian gene but does not encode the full mammalian gene, e.g., encodes one or more exons but does not encode a full-length protein;
[0063] v. the heterologous object sequence encodes one or more introns;
[0064] vi. the heterologous object sequence is other than a GFP, e.g., is other than a fluorescent protein or is other than a reporter protein; or
[0065] vii. the heterologous object sequence is other than a T cell chimeric antigen receptor.
   191. The system or method of any preceding embodiments, wherein one or both of the reverse transcriptase domain or endonuclease domain are derived from an avian retrotransposase, e.g., have a sequence of Table 1 or 3 or at least 70%, 75%, 80%, 85%, 90%, 95%, 96%, 97%, 98%, or 99% identity thereto.
   192. The system or method of any preceding embodiments, wherein the polypeptide has an activity at 37° C. that is no less than 70%, 75%, 80%, 85%, 90%, or 95% of its activity at 25° C. under otherwise similar conditions.
   193. The system or method of any preceding embodiments, wherein the polypeptide is derived from an avian retrotransposase, e.g., an avian retrotransposase of column 8 of Table 3, or a sequence having at least 70%, 75%, 80%, 85%, 90%, 95%, 96%, 97%, 98%, or 99% identity thereto.
   194. The system or method of any preceding embodiments, wherein the avian retrotransposase is a retrotransposase from Taeniopygia guttata, Geospiza fortis, Zonotrichia albicollis, or Tinamus guttatus, or a sequence having at least 70%, 75%, 80%, 85%, 90%, 95%, 96%, 97%, 98%, or 99% identity thereto.
   195. The system or method of any preceding embodiments, wherein the polypeptide is derived from a retrotransposase of column 8 of Table 3, or a sequence having at least 70%, 75%, 80%, 85%, 90%, 95%, 96%, 97%, 98%, or 99% identity thereto.
   196. The system of any of the preceding embodiments, wherein the template RNA comprises a sequence of Table 3 (e.g., one or both of a 5′ untranslated region of column 6 of Table 3 and a 3′ untranslated region of column 7 of Table 3), or a sequence having at least 70%, 75%, 80%, 85%, 90%, 95%, 96%, 97%, 98%, or 99% identity thereto.
   197. The system or method of any preceding embodiments, wherein one or more of:
[0066] i. the nucleic acid encoding the polypeptide and the template RNA or a nucleic acid encoding the template RNA are separate nucleic acids;
[0067] ii. the template RNA does not encode an active reverse transcriptase, e.g., comprises an inactivated mutant reverse transcriptase, e.g., as described in Examples 1-2, or does not comprise a reverse transcriptase sequence; or
[0068] iii. the template RNA does not encode an active endonuclease, e.g., comprises an inactivated endonuclease or does not comprise an endonuclease; or
[0069] iv. the template RNA comprises one or more chemical modifications.
   198. The system or method of any preceding embodiments, wherein the template RNA (or DNA encoding the template RNA) further comprises a promoter operably linked to the heterologous object sequence,

[0070] wherein the promoter is disposed between the 5′ untranslated sequence that binds the polypeptide and the heterologous sequence, or

[0071] wherein the promoter is disposed between the 3′ untranslated sequence that binds the polypeptide and the heterologous sequence.

199. The system or method of any preceding embodiments, wherein the template RNA (or DNA encoding the template RNA) further comprises a 5′ untranslated sequence that binds the polypeptide and a 3′ untranslated sequence that binds the polypeptide, and

[0072] wherein the heterologous object sequence comprises an open reading frame (or the reverse complement thereof) in a 5′ to 3′ orientation on the template RNA; or

[0073] wherein the heterologous object sequence comprises an open reading frame (or the reverse complement thereof) in a 3′ to 5′ orientation on the template RNA.

200. The system or method of any preceding embodiments, wherein at least one of the reverse transcriptase domain, endonuclease domain, or target DNA binding domain are heterologous.
201. The system or method of any preceding embodiments, wherein the polypeptide comprises a sequence at least 80% identical (e.g., at least 85%, 90%, 95%, 97%, 98%, 99%, 100% identical) to a reverse transcriptase domain of a purinic/apyrimidinic endonuclease (APE)-type non-LTR retrotransposon and a sequence at least 80% identical (e.g., at least 85%, 90%, 95%, 97%, 98%, 99%, 100% identical) to an endonuclease domain of an APE-type non-LTR retrotransposon.
202. The system or method of any preceding embodiments, wherein the polypeptide comprises a sequence at least 80% identical (e.g., at least 85%, 90%, 95%, 97%, 98%, 99%, 100% identical) to a reverse transcriptase domain of a restriction enzyme-like endonuclease (RLE)-type non-LTR retrotransposon and a sequence at least 80% identical (e.g., at least 85%, 90%, 95%, 97%, 98%, 99%, 100% identical) to an endonuclease domain of a RLE-type non-LTR retrotransposon.
203. The system or method of any preceding embodiments, wherein the RT domain comprises a sequence selected of Table 1 or 3 or a sequence of a reverse transcriptase domain of Table 2, wherein the RT domain further comprises a number of substitutions relative to the natural sequence, e.g., at least 1, 2, 3, 4, 5, 10, 20, 30, 40, 50, 60, 70, 80, 90, or 100 substitutions.
204. The system or method of any preceding embodiments, wherein the RT domain comprises a sequence selected of Table 1 or 3 or a sequence of a reverse transcriptase domain of Table 2, or a sequence that has at least 70%, 75%, 80%, 85%, 90%, 95%, 96%, 97%, 98%, or 99% identity thereto.
205. The system or method of any preceding embodiments, wherein the template RNA comprises a promoter operably linked to the heterologous object sequence.
206. The system or method of any of the preceding embodiments, wherein the polypeptide further comprises (iii) a DNA-binding domain.
207. The system or method of any of embodiments 140-144, wherein the polypeptide comprises a sequence at least 80% identical (e.g., at least 85%, 90%, 95%, 97%, 98%, 99%, 100% identical) to the sequence of SEQ ID NO: 1016.
208. The system or method of any of the preceding embodiments, wherein the polypeptide comprises a sequence at least 80% identical (e.g., at least 85%, 90%, 95%, 97%, 98%, 99%, 100% identical) to a sequence in column 8 of Table 3.
209. The system or method of any of the preceding embodiments, wherein the nucleic acid encoding the polypeptide and the template RNA or the nucleic acid encoding the template RNA are covalently linked, e.g., are part of a fusion nucleic acid.
210. The system or method of any preceding embodiments, wherein the fusion nucleic acid comprises RNA.
211. The system or method of any preceding embodiments, wherein the fusion nucleic acid comprises DNA.
212. The system or method of any of the preceding embodiments, wherein (b) comprises template RNA.
213. The system or method of any preceding embodiments, wherein the template RNA further comprises a nuclear localization signal.
214. The system or method of any preceding embodiments, wherein the RNA of (a) does not comprise a nuclear localization signal.
215. The system or method of any of the preceding embodiments, wherein the polypeptide further comprises a nuclear localization signal and/or a nucleolar localization signal.
216. The system or method of any of the preceding embodiments, wherein (a) comprises an RNA that encodes: (i) the polypeptide and (ii) a nuclear localization signal and/or a nucleolar localization signal.
217. The system or method of any of the preceding embodiments, wherein the RNA comprises a pseudoknot sequence, e.g., 5′ of the heterologous object sequence.
218. The system or method of any preceding embodiments, wherein the RNA comprises a stem-loop sequence or a helix, 5′ of the pseudoknot sequence.
219. The system or method of any preceding embodiments, wherein the RNA comprises one or more (e.g., 2, 3, or more) stem-loop sequences or helices 3′ of the pseudoknot sequence, e.g. 3′ of the pseudoknot sequence and 5′ of the heterologous object sequence.
220. The system or method of any preceding embodiments, wherein the template RNA comprising the pseudoknot has catalytic activity, e.g., RNA-cleaving activity, e.g, cis-RNA-cleaving activity.
221. The system or method of any of the preceding embodiments, wherein the RNA comprises at least one stem-loop sequence or helix, e.g., 3′ of the heterologous object sequence, e.g. 1, 2, 3, 4, 5 or more stem-loop sequences, hairpins or helices sequences.
222. Any above-numbered system or method, wherein the polypeptide comprises a sequence of at least 50 amino acids (e.g., at least 100, 150, 200, 300, 500 amino acids) having at least 80% identity (e.g., at least 85%, 90%, 95%, 97%, 98%, 99%, 100% identity) to a sequence of a polypeptide listed in Table 1-3, or a reverse transcriptase domain or endonuclease domain thereof.
223. Any above-numbered system or method, wherein the polypeptide comprises a sequence of at least 50 amino acids (e.g., at least 100, 150, 200, 300, 500 amino acids) having at least 80% identity (e.g., at least 85%, 90%, 95%, 97%, 98%, 99%, 100% identity) to a sequence of a polypeptide listed in any of Tables 1-3 or a reverse transcriptase domain, endonuclease domain, or DNA binding domain thereof.
224. Any above-numbered system or method, wherein the polypeptide comprises a sequence of at least 50 amino acids (e.g., at least 100, 150, 200, 300, 500 amino acids) having at least 80% identity (e.g., at least 85%, 90%, 95%, 97%, 98%, 99%, 100% identity) to the amino acid sequence of column 8 of Table 3, or a reverse transcriptase domain, endonuclease domain, or DNA binding domain thereof.
225. Any above-numbered system or method, wherein the template RNA comprises a sequence of Table 3 (e.g., one or both of a 5′ untranslated region of column 6 of Table 3 and a 3′ untranslated region of column 7 of Table 3), or a sequence having at least 70%, 75%, 80%, 85%, 90%, 95%, 96%, 97%, 98%, or 99% identity thereto.
226. The system or method of any preceding embodiments, wherein the template RNA comprises a sequence of about 100-125 bp from a 3′ untranslated region of column 7 of Table 3, e.g., wherein the sequence comprises nucleotides 1-100, 101-200, or 201-325 of the 3′ untranslated region of column 7 of Table 3, or a sequence having at least 70%, 75%, 80%, 85%, 90%, 95%, 96%, 97%, 98%, or 99% identity thereto.
227. Any above-numbered system or method, wherein (a) comprises RNA and (b) comprises RNA.
228. Any above-numbered system or method, wherein (a), (b), or (a) and (b) do not comprise DNA, or do not comprise more than 10%, 5%, 4%, 3%, 2%, or 1% DNA by mass or by molar amount.
229. Any above-numbered system, which is capable of modifying DNA by insertion of the heterologous object sequence without an intervening DNA-dependent RNA polymerization of (b).
230. Any above-numbered system, which is capable of modifying DNA by target primed reverse transcription.
231. Any above-numbered system, which is capable of modifying DNA by insertion of a heterologous object sequence in the presence of an inhibitor of a DNA repair pathway (e.g., SCR7, a PARP inhibitor), or in a cell line deficient for a DNA repair pathway (e.g., a cell line deficient for the nucleotide excision repair pathway or the homology-directed repair pathway).
232. Any above-numbered system, which does not cause formation of a detectable level of double stranded breaks in a target cell.
233. Any above-numbered system, which is capable of modifying DNA using reverse transcriptase activity, and optionally in the absence of homologous recombination activity.
234. Any above-numbered system, wherein the template RNA has been treated to reduce secondary structure, e.g., was heated, e.g., to a temperature that reduces secondary structure, e.g., to at least 70, 75, 80, 85, 90, or 95° C.
235. The system of any preceding embodiments, wherein the template RNA was subsequently cooled, e.g., to a temperature that allows for secondary structure, e.g, to less than or equal to 30, 25, or 20° C.
236. A host cell (e.g., a mammalian cell, e.g., a human cell) comprising any preceding numbered system.
237. The method of any preceding embodiments, wherein the cell, tissue or subject is a mammalian (e.g., human) cell, tissue or subject.
238. The method of any of the preceding embodiments, wherein the cell is a fibroblast.
239. The method of any of the preceding embodiments, wherein the cell is a primary cell.
240. The method of any of the preceding embodiments, where in the cell is not immortalized.
241. A method of modifying the genome of a mammalian cell, comprising contacting the cell with the system of any preceding embodiments.
242. A method of inserting DNA into the genome of a mammalian cell, comprising contacting the cell with the system of any preceding embodiments.
243. A method of adding at least 5, 10, 15, 20, 25, 30, 35, 40, 45, 50, 60, 70, 80, 90, 100, 150, 200, 250, 300, 350, 400, 500, 1000 bp of exogenous DNA to the genome of a mammalian cell, without delivery of DNA to the cell, comprising contacting the cell with a system of any preceding embodiments.
244. A method of adding at least 5, 10, 15, 20, 25, 30, 35, 40, 45, 50, 60, 70, 80, 90, 100, 150, 200, 250, 300, 350, 400, 500, 1000 bp of exogenous DNA to the genome of a mammalian cell, comprising contacting the cell with a system of any preceding embodiments,

[0074] wherein the method does not comprise contacting the mammalian cell with DNA, or

[0075] wherein the method comprises contacting the mammalian cell with a composition comprising less than 1%, 0.5%, 0.2%, 0.1%, 0.05%, 0.02%, or 0.01% DNA by mass or by molar amount of nucleic acid.

245. A method of adding at least 5, 10, 15, 20, 25, 30, 35, 40, 45, 50, 60, 70, 80, 90, 100, 150, 200, 250, 300, 350, 400, 500, 1000 bp of exogenous DNA to the genome of a mammalian cell, comprising contacting the cell with a system of any preceding embodiments, wherein the method delivers only RNA to the mammalian cell.
246. A method of adding at least 5, 10, 15, 20, 25, 30, 35, 40, 45, 50, 60, 70, 80, 90, 100, 150, 200, 250, 300, 350, 400, 500, 1000 bp of exogenous DNA to the genome of a mammalian cell, comprising contacting the cell with a system of any preceding embodiments, wherein the method delivers RNA and protein to the mammalian cell.
247. The method of any preceding embodiments, wherein the template RNA serves as the template for insertion of the exogenous DNA.
248. The method of any preceding embodiments, which does not comprise DNA-dependent RNA polymerization of exogenous DNA.
249. The method of any preceding embodiments, which results in the addition of at least 5, 10, 20, 50, 100, 200, 500, 1,000, 2,000, or 5,000 base pairs of DNA to the genome of the cell, e.g., the mammalian cell.
250. A method of modifying the genome of a human cell, comprising contacting the cell with a system of any preceding embodiments,

[0076] wherein the method results in insertion of the heterologous object sequence into the human cell's genome,

[0077] wherein the human cell does not show upregulation of any DNA repair genes and/or tumor suppressor genes, or wherein no DNA repair gene and/or tumor suppressor gene is upregulated by more than 10%, 5%, 2%, or 1%, e.g., wherein upregulation is measured by RNA-seq, e.g., as described in Example 14 of PCT/US2019/048607, incorporated herein by reference.

251. A method of adding an exogenous coding region to the genome of a cell (e.g., a mammalian cell), comprising contacting the cell with a system of any preceding embodiments, wherein the template RNA comprises the non-coding strand of the exogenous coding region, wherein optionally the template RNA does not comprise a coding strand of the exogenous coding region, wherein optionally the delivery comprises non-viral delivery.
252. A method of expressing a polypeptide in a cell (e.g., a mammalian cell), comprising contacting the cell with a system of any preceding embodiments, wherein the template RNA comprises a non-coding strand that is the reverse complement of a sequence that would encoding the polypeptide, wherein optionally the template RNA does not comprise a coding strand encoding the polypeptide, wherein optionally the delivery comprises non-viral delivery.
253. The method of any preceding embodiments, wherein the sequence that is inserted into the mammalian genome is a sequence that is exogenous to the mammalian genome.
254. The method of any preceding embodiments, wherein the system operates independently of a DNA template.
255. The method of any preceding embodiments, wherein the cell is part of a tissue.
256. The method of any preceding embodiments, wherein the mammalian cell is euploid, is not immortalized, is part of an organism, is a primary cell, is non-dividing, is a hepatocyte, or is from a subject having a genetic disease.
257. The method of any preceding embodiments, wherein the contacting comprises contacting the cell with a plasmid, virus, viral-like particle, virosome, liposome, vesicle, exosome, fusosome, or lipid nanoparticle.
258. The method of any preceding embodiments, wherein the contacting comprises using non-viral delivery.
259. The method of any preceding embodiments, which comprises comprising contacting the cell with the template RNA (or DNA encoding the template RNA), wherein the template RNA comprises the non-coding strand of an exogenous coding region, wherein optionally the template RNA does not comprise a coding strand of the exogenous coding region, wherein optionally the delivery comprises non-viral delivery, thereby adding the exogenous coding region to the genome of the cell.
260. The method of any preceding embodiments, which comprises contacting the cell with the template RNA (or DNA encoding the template RNA), wherein the template RNA comprises a non-coding strand that is the reverse complement of a sequence that would encoding the polypeptide, wherein optionally the template RNA does not comprise a coding strand encoding the polypeptide, wherein optionally the delivery comprises non-viral delivery, thereby expressing the polypeptide in the cell.
261. The method of any preceding embodiments, wherein the contacting comprises administering (a) and (b) to a subject, e.g., intravenously.
262. The method of any preceding embodiments, wherein the contacting comprises administering a dose of (a) and (b) to a subject at least twice.
263. The method of any preceding embodiments, wherein the polypeptide reverse transcribes the template RNA sequence into the target DNA strand, thereby modifying the target DNA strand.
264. The method of any preceding embodiments, wherein (a) and (b) are administered separately.
265. The method of any preceding embodiments, wherein (a) and (b) are administered together.
266. The method of any any preceding embodiments, wherein the nucleic acid of (a) is not integrated into the genome of the host cell.
267. Any preceding numbered method, wherein the sequence that binds the polypeptide has one or more of the following characteristics:
[0078] (a) is at the 3′ end of the template RNA;
[0079] (b) is at the 5′ end of the template RNA;
[0080] (b) is a non-coding sequence;
[0081] (c) is a structured RNA; or
[0082] (d) forms at least 1 hairpin loop structures.
   268. Any preceding numbered method, wherein the template RNA further comprises a sequence comprising at least 20 nucleotides of at least 80% identity (e.g., at least 85%, 90%, 95%, 97%, 98%, 99%, 100% identity) to a target DNA strand.
   269. Any preceding numbered method, wherein the template RNA further comprises a sequence comprising at least 2, 3, 4, 5, 6, 7, 8, 9, 10, 11, 12, 13, 14, 15, 20, 25, 30, 35, 40, 45, 50, 60, 70, 80, 90, 100, 110, 120, 130, 140, 150 nucleotides of at least 80% identity (e.g., at least 85%, 90%, 95%, 97%, 98%, 99%, 100% identity) to a target DNA strand.
   270. Any preceding numbered method, wherein the sequence comprising at least 2, 3, 4, 5, 6, 7, 8, 9, 10, 11, 12, 13, 14, 15, 20, 25, 30, 35, 40, 45, 50, 60, 70, 80, 90, 100, 110, 120, 130, 140, 150 nucleotides, or about: 2-10, 10-20, 20-30, 30-40, 40-50, 50-60, 60-70, 70-80, 80-90, 90-100, 10-100, or 2-100 nucleotides, of at least 80% identity to a target DNA strand is at the 3′ end of the template RNA.
   271. Any preceding numbered method, wherein the template RNA further comprises a sequence comprising at least 100 nucleotides of at least 80% identity (e.g., at least 85%, 90%, 95%, 97%, 98%, 99%, 100% identity) to a target DNA strand, e.g., at the 3′ end of the template RNA.
   272. The method of any preceding embodiments, wherein the site in the target DNA strand to which the sequence comprises at least 80% identity is proximal to (e.g., within about: 0-10, 10-20, 20-30, 30-50, or 50-100 nucleotides of) a target site on the target DNA strand that is recognized (e.g., bound and/or cleaved) by the polypeptide comprising the endonuclease.
   273. Any preceding numbered method, wherein the sequence comprising at least 2, 3, 4, 5, 6, 7, 8, 9, 10, 11, 12, 13, 14, 15, 20, 25, 30, 35, 40, 45, 50, 60, 70, 80, 90, 100, 110, 120, 130, 140, 150 nucleotides, or about: 2-10, 10-20, 20-30, 30-40, 40-50, 50-60, 60-70, 70-80, 80-90, 90-100, 10-100, or 2-100 nucleotides, of at least 80% identity to a target DNA strand is at the 3′ end of the template RNA;

[0083] optionally wherein the site in the target DNA strand to which the sequence comprises at least 80% identity is proximal to (e.g., within about: 0-10, 10-20, or 20-30 nucleotides of) a target site on the target DNA strand that is recognized (e.g., bound and/or cleaved) by the polypeptide comprising the endonuclease.

274. The method of any preceding embodiments, wherein the target site is the site in the human genome that has the closest identity to a native target site of the polypeptide comprising the endonuclease, e.g., wherein the target site in the human genome has at least about: 16, 17, 18, 19, or 20 nucleotides identical to the native target site.
275. Any preceding numbered method, wherein the template RNA has at least 3, 4, 5, 6, 7, 8, 9, or 10 bases of 100% identity to the target DNA strand.
276. Any preceding numbered method, wherein the at least 3, 4, 5, 6, 7, 8, 9, or 10 bases of 100% identity to the target DNA strand are at the 3′ end of the template RNA.
277. Any preceding numbered method, wherein the at least 3, 4, 5, 6, 7, 8, 9, or 10 bases of 100% identity to the target DNA strand are at the 5′ end of the template RNA.
278. Any preceding numbered method, wherein the template RNA comprises at least 3, 4, 5, 6, 7, 8, 9, or 10 bases of 100% identity to the target DNA strand at the 5′ end of the template RNA and at least 3, 4, 5, 6, 7, 8, 9, or 10 bases of 100% identity to the target DNA strand at the 3′ end of the template RNA.
279. Any preceding numbered method, wherein the heterologous object sequence is between 50-50,000 base pairs (e.g., between 50-40,000 bp, between 500-30,000 bp between 500-20,000 bp, between 100-15,000 bp, between 500-10,000 bp, between 50-10,000 bp, between 50-5,000 bp).
280. Any preceding numbered method, wherein the heterologous object sequence is at least 10, 25, 50, 100, 150, 200, 250, 300, 400, 500, 600, or 700 bp.
281. Any preceding numbered method, wherein the heterologous object sequence is at least 715, 750, 800, 950, 1,000, 2,000, 3,000, or 4,000 bp.
282. Any preceding numbered method, wherein the heterologous object sequence is less than 5,000, 10,000, 15,000, 20,000, 30,000, or 40,000 bp.
283. Any preceding numbered method, wherein the heterologous object sequence is less than 700, 600, 500, 400, 300, 200, 150, or 100 bp.
284. Any preceding numbered method, wherein the heterologous object sequence comprises:

[0084] (a) an open reading frame, e.g., a sequence encoding a polypeptide, e.g., an enzyme (e.g., a lysosomal enzyme), a membrane protein, a blood factor, an exon, an intracellular protein (e.g., a cytoplasmic protein, a nuclear protein, an organellar protein such as a mitochondrial protein or lysosomal protein), an extracellular protein, a structural protein, a signaling protein, a regulatory protein, a transport protein, a sensory protein, a motor protein, a defense protein, or a storage protein;

[0085] (b) a non-coding and/or regulatory sequence, e.g., a sequence that binds a transcriptional modulator, e.g., a promoter, an enhancer, an insulator;

[0086] (c) a splice acceptor site;

[0087] (d) a polyA site;

[0088] (e) an epigenetic modification site; or

[0089] (f) a gene expression unit.

285. Any preceding numbered method, wherein the target DNA is a genomic safe harbor (GSH) site.
286. Any preceding numbered method, wherein the target DNA is a genomic Natural Harbor site.
287. Any preceding numbered method, which results in insertion of the heterologous object sequence into the a target site in the genome at an average copy number of at least 0.01, 0.025, 0.05, 0.075, 0.1, 0.15, 0.2, 0.25, 0.3, 0.4, 0.5, 0.75, 1, 1.25, 1.5, 1.75, 2, 2.5, 3, 4, or 5 copies per genome.
288. Any preceding numbered method, which results in about 25-100%, 50-100%, 60-100%, 70-100%, 75-95%, 80%-90%, of integrants into a target site in the genome being non-truncated, as measured by an assay described herein, e.g., an assay of Example 6.
289. Any preceding numbered method, which results in insertion of the heterologous object sequence only at one target site in the genome of the cell.
290. Any preceding numbered method, which results in insertion of the heterologous object sequence into a target site in a cell, wherein the inserted heterologous sequence comprises less than 10%, 5%, 2%, 1%, 0.5%, 0.2%, or 0.1% mutations (e.g., SNPs or one or more deletions, e.g., truncations or internal deletions) relative to the heterologous sequence prior to insertion, e.g., as measured by an assay of Example 12 of PCT/US2019/048607, incorporated herein by reference.
291. Any preceding numbered method, which results in insertion of the heterologous object sequence into a target site in a plurality of cells, wherein less than 10%, 5%, 2%, or 1% of copies of the inserted heterologous sequence comprise a mutation (e.g., a SNP or a deletion, e.g., a truncation or an internal deletion), e.g., as measured by an assay of Example 12 of PCT/US2019/048607, incorporated herein by reference.
292. Any preceding numbered method, which results in insertion of the heterologous object sequence into a target cell genome, and wherein the target cell does not show upregulation of p53, or shows upregulation of p53 by less than 10%, 5%, 2%, or 1%, e.g., wherein upregulation of p53 is measured by p53 protein level, e.g., according to the method described in Example 30 of PCT/US2019/048607, incorporated herein by reference, or by the level of p53 phosphorylated at Ser15 and Ser20.
293. Any preceding numbered method, which results in insertion of the heterologous object sequence into a target cell genome, and wherein the target cell does not show upregulation of any DNA repair genes and/or tumor suppressor genes, or wherein no DNA repair gene and/or tumor suppressor gene is upregulated by more than 10%, 5%, 2%, or 1%, e.g., wherein upregulation is measured by RNA-seq, e.g., as described in Example 14 of PCT/US2019/048607, incorporated herein by reference.
294. Any preceding numbered method, which results in insertion of the heterologous object sequence into the target site (e.g., at a copy number of 1 insertion or more than one insertion) in about 1-80% of cells in a population of cells contacted with the system, e.g., about: 1-10%, 10-20%, 20-30%, 30-40%, 40-50%, 50-60%, 60-70%, or 70-80% of cells, e.g., as measured using single cell ddPCR, e.g., as described in Example 17 of PCT/US2019/048607, incorporated herein by reference.
295. Any preceding numbered method, which results in insertion of the heterologous object sequence into the target site at a copy number of 1 insertion in about 1-80% of cells in a population of cells contacted with the system, e.g., about: 1-10%, 10-20%, 20-30%, 30-40%, 40-50%, 50-60%, 60-70%, or 70-80% of cells, e.g., as measured using colony isolation and ddPCR, e.g., as described in Example 18 of PCT/US2019/048607, incorporated herein by reference.
296. Any preceding numbered method, which results in insertion of the heterologous object sequence into the target site (on-target insertions) at a higher rate that insertion into a non-target site (off-target insertions) in a population of cells, wherein the ratio of on-target insertions to off-target insertions is greater than 10:1, 20:1, 30:1, 40:1, 50:1, 60:1, 70:1, 80:1. 90:1, 100:1, 200:1, 500:1, or 1,000:1, e.g., using an assay of Example 11 of PCT/US2019/048607, incorporated herein by reference.
297. Any above-numbered method, results in insertion of a heterologous object sequence in the presence of an inhibitor of a DNA repair pathway (e.g., SCR7, a PARP inhibitor), or in a cell line deficient for a DNA repair pathway (e.g., a cell line deficient for the nucleotide excision repair pathway or the homology-directed repair pathway).
298. Any preceding numbered system, formulated as a pharmaceutical composition.
299. Any preceding numbered system, disposed in a pharmaceutically acceptable carrier (e.g., a vesicle, a liposome, a natural or synthetic lipid bilayer, a lipid nanoparticle, an exosome).
300. A method of making a system for modifying DNA (e.g., as described herein), the method comprising:
(a) providing a template nucleic acid (e.g., a template RNA or DNA) comprising a heterologous homology sequence having at least 85%, 90%, 95%, 96%, 97%, 98%, 99%, or 100% homology to a sequence comprised in a target DNA molecule, and/or
(b) providing a polypeptide of the system (e.g., comprising a DNA-binding domain (DBD) and/or an endonuclease domain) comprising a heterologous targeting domain that binds specifically to a sequence comprised in the target DNA molecule.
301. The method of any preceding embodiments, wherein:
(a) comprises introducing into the template nucleic acid (e.g., a template RNA or DNA) a heterologous homology sequence having at least 50%, 60%, 70%, 80%, 85%, 90%, 95%, 96%, 97%, 98%, 99%, or 100% homology to the sequence comprised in a target DNA molecule, and/or
(b) comprises introducing into the polypeptide of the system (e.g., comprising a DNA-binding domain (DBD) and/or an endonuclease domain) the heterologous targeting domain that binds specifically to a sequence comprised in the target DNA molecule.
302. The method of any preceding embodiments, wherein the introducing of (a) comprises inserting the homology sequence into the template nucleic acid.
303. The method of any preceding embodiments, wherein the introducing of (a) comprises replacing a segment of the template nucleic acid with the homology sequence.
304. The method of any preceding embodiments, wherein the introducing of (a) comprises mutating one or more nucleotides (e.g., at least 2, 3, 4, 5, 10, 15, 20, 25, 30, 35, 40, 50, 60, 70, 80, 90, or 100 nucleotides) of the template nucleic acid, thereby producing a segment of the template nucleic acid having the sequence of the homology sequence.
305. The method of any preceding embodiments, wherein the introducing of (b) comprises inserting the amino acid sequence of the targeting domain into the amino acid sequence of the polypeptide.
306. The method of any preceding embodiments, wherein the introducing of (b) comprises inserting a nucleic acid sequence encoding the targeting domain into a coding sequence of the polypeptide comprised in a nucleic acid molecule.
307. The method of any preceding embodiments, wherein the introducing of (b) comprises replacing at least a portion of the polypeptide with the targeting domain.
308. The method of any preceding embodiments, wherein the introducing of (a) comprises mutating one or more amino acids (e.g., at least 1, 2, 3, 4, 5, 6, 7, 8, 9, 10, 15, 20, 25, 30, 40, 50, 60, 70, 80, 90, 100, 150, 200, 250, 300, 400, 500, or more amino acids) of the polypeptide.
309. The method of any preceding embodiments, wherein the motif recognized by the endonuclease domain (e.g., at least 2, 4, 6, 8, 10, 20, 30, 40, or at least 50 nt, or no more than 50, 40, 30, 20, 10, 8, 6, 4, or 2) or less than 3 less than Gene Write polypeptide, is used as a seed for retargeting the Gene Writing system, wherein the DNA binding domain is modified such that the binding of the Gene Writer polypeptide to the new target site results in the proper positioning of the endonuclease domain to the core motif to enable endonuclease activity, optionally wherein the motif recognized by the endonuclease domain comprises 4, 5, 6, 7, 8, 9, or 10 consecutive nucleotides of TTAAGGTAGC (SEQ ID NO: 2007), AAGGTAGCCAAA (SEQ ID NO: 2008), or TAAGGTAGCCAAA (SEQ ID NO: 2009), or wherein the motif recognized by the endonuclease domain comprises 2 or 3, or 4 consecutive nucleotides of AAGG.
310. The method of any preceding embodiments, wherein AAGG sequence in the genome is used as a seed for retargeting the Gene Writing system, wherein the DNA binding domain is modified such that the binding of the Gene Writer polypeptide to the new target site results in the proper positioning of the endonuclease domain to the AAGG motif to enable endonuclease activity.
311. A method for modifying a target site in genomic DNA in a cell, the method comprising contacting the cell with:
(a) a polypeptide or a nucleic acid encoding the polypeptide, wherein the polypeptide comprises
(i) a reverse transcriptase (RT) domain, (ii) a DNA-binding domain (DBD); and (iii) an endonuclease domain, e.g., a nickase domain; and
(b) a template RNA (or DNA encoding the template RNA) comprising (e.g., from 5′ to 3′) (i) optionally a sequence that binds the target site (e.g., a second strand of a site in a target genome), (ii) optionally a sequence that binds the polypeptide, (iii) a heterologous object sequence, and (iv) a 3′ target homology domain,
wherein:
(i) the polypeptide comprises a heterologous targeting domain (e.g., in the DBD or the endonuclease domain) that binds specifically to a sequence comprised in or adjacent to the target site of the genomic DNA; and/or
(ii) the template RNA comprises a heterologous homology sequence having at least 85%, 90%, 95%, 96%, 97%, 98%, 99%, or 100% homology to a sequence comprised in or adjacent to the target site of the genomic DNA;

[0090] thereby modifying the target site in genomic DNA in a cell.

312. A method of making a system for modifying the genome of a mammalian cell, comprising:

[0091] a) providing a template RNA as described in any of the preceding embodiments, e.g., wherein the template RNA comprises (i) a sequence that binds a polypeptide comprising a reverse transcriptase domain and an endonuclease domain, and (ii) a heterologous object sequence; and

[0092] b) treating the template RNA to reduce secondary structure, e.g., heating the template RNA, e.g., to at least 70, 75, 80, 85, 90, or 95° C., and

[0093] c) subsequently cooling the template RNA, e.g., to a temperature that allows for secondary structure, e.g, to less than or equal to 30, 25, or 20° C.

313. The method of any preceding embodiments, which further comprises contacting the template RNA with a polypeptide that comprises (i) a reverse transcriptase domain and (ii) an endonuclease domain, or with a nucleic acid (e.g., RNA) encoding the polypeptide.
314. The method of any preceding embodiments, which further comprises contacting the template RNA with a cell.
315. The system or method of any of the preceding embodiments, wherein the heterologous object sequence encodes a therapeutic polypeptide.
316. The system or method of any of the preceding embodiments, wherein the heterologous object sequence encodes a mammalian (e.g., human) polypeptide, or a fragment or variant thereof.
317. The system or method of any of the preceding embodiments, wherein the heterologous object sequence encodes an enzyme (e.g., a lysosomal enzyme), a blood factor (e.g., Factor I, II, V, VII, X, XI, XII or XIII), a membrane protein, an exon, an intracellular protein (e.g., a cytoplasmic protein, a nuclear protein, an organellar protein such as a mitochondrial protein or lysosomal protein), an extracellular protein, a structural protein, a signaling protein, a regulatory protein, a transport protein, a sensory protein, a motor protein, a defense protein, or a storage protein.
318. The system or method of any of the preceding embodiments, wherein the heterologous object sequence comprises a tissue specific promoter or enhancer.
319. The system or method of any of the preceding embodiments, wherein the heterologous object sequence encodes a polypeptide of greater than 250, 300, 400, 500, or 1,000 amino acids, and optionally up to 1300 amino acids.
320. The system or method of any of the preceding embodiments, wherein the heterologous object sequence encodes a fragment of a mammalian gene but does not encode the full mammalian gene, e.g., encodes one or more exons but does not encode a full-length protein.
321. The system or method of any of the preceding embodiments, wherein the heterologous object sequence encodes one or more introns.
322. The system or method of any of the preceding embodiments, wherein the heterologous object sequence is other than a GFP, e.g., is other than a fluorescent protein or is other than a reporter protein.
323. The system or method of any of the preceding embodiments, wherein the polypeptide comprises (i) a reverse transcriptase domain and (ii) an endonuclease domain, wherein one or both of (i) or (ii) are derived from an avian retrotransposase, e.g., have a sequence of Table 1 or 3, or of a protein domain listed in Table 2, or at least 70%, 75%, 80%, 85%, 90%, 95%, 96%, 97%, 98%, or 99% identity thereto.
324. The system or method of any preceding embodiments, wherein the polypeptide comprises (i) a reverse transcriptase domain and (ii) an endonuclease domain, wherein one or both of (i) or (ii) are derived from an avian retrotransposase, and wherein one or both of (i) or (ii) further comprises a number of substitutions relative to the natural sequence, e.g., at least 1, 2, 3, 4, 5, 10, 20, 30, 40, 50, 60, 70, 80, 90, or 100 substitutions.
325. The system or method of any of the preceding embodiments, wherein the polypeptide has an activity at 37° C. that is no less than 70%, 75%, 80%, 85%, 90%, or 95% of its activity at 25° C. under otherwise similar conditions.
326. The system or method of any of the preceding embodiments, wherein the nucleic acid encoding the polypeptide and the template RNA or a nucleic acid encoding the template RNA are separate nucleic acids.
327. The system or method of any of the preceding embodiments, wherein the template RNA does not encode an active reverse transcriptase, e.g., comprises an inactivated mutant reverse transcriptase, e.g., as described in Example 1 or 2 of PCT/US2019/048607, incorporated herein by reference, or does not comprise a reverse transcriptase sequence.
328. The system or method of any of the preceding embodiments, wherein the template RNA comprises one or more chemical modifications.
329. The system or method of any of the preceding embodiments, wherein the heterologous object sequence is disposed between the promoter and the sequence that binds the polypeptide.
330. The system or method of any of the preceding embodiments, wherein the promoter is disposed between the heterologous object sequence and the sequence that binds the polypeptide.
331. The system or method of any of the preceding embodiments, wherein the heterologous object sequence comprises an open reading frame (or the reverse complement thereof) in a 5′ to 3′ orientation on the template RNA.
332. The system or method of any of the preceding embodiments, wherein the heterologous object sequence comprises an open reading frame (or the reverse complement thereof) in a 3′ to 5′ orientation on the template RNA.
333. The system or method of any of the preceding embodiments, wherein the polypeptide comprises (a) a reverse transcriptase domain and (b) an endonuclease domain, wherein at least one of (a) or (b) is heterologous.
334. The system or method of any of the preceding embodiments, wherein the polypeptide comprises (a) a target DNA binding domain, (b) a reverse transcriptase domain and (c) an endonuclease domain, wherein at least one of (a), (b) or (c) is heterologous.
335. A polypeptide or a nucleic acid encoding the polypeptide, wherein the polypeptide comprises (i) a reverse transcriptase (RT) domain, (ii) a DNA-binding domain (DBD); and (iii) an endonuclease domain; wherein the DBD and/or the endonuclease domain comprise a heterologous targeting domain that binds specifically to a sequence comprised in a target DNA molecule (e.g., a genomic DNA).
336. A polypeptide or a nucleic acid encoding a polypeptide, wherein the polypeptide comprises (i) a first target DNA binding domain, e.g., comprising a first Zn finger domain, (ii) a reverse transcriptase domain, (iii) an endonuclease domain, and (iv) a second target DNA binding domain, e.g., comprising a second Zn finger domain, heterologous to the first target DNA binding domain.
337. The polypeptide or nucleic acid encoding the polypeptide of any preceding embodiments, wherein (iii) comprises (iv).
338. A polypeptide or a nucleic acid encoding a polypeptide, wherein the polypeptide comprises (i) a target DNA binding domain, (ii) a reverse transcriptase domain, optionally (iii) an endonuclease domain, wherein the polypeptide comprises a heterologous linker replacing a portion of (i), (ii), or (iii), or replacing an endogenous linker connecting two of (i), (ii), or (iii).
339. The polypeptide of any preceding embodiments, wherein the heterologous linker replaces, e.g., deletes, a portion of (i).
340. The polypeptide of any preceding embodiments, wherein the heterologous linker replaces, e.g., deletes, a portion of (ii).
341. The polypeptide of any preceding embodiments, wherein the heterologous linker replaces, e.g., deletes, a portion of (iii).
342. The polypeptide of any preceding embodiments, wherein the heterologous linker replaces, e.g., deletes, a portion of (i) and (ii).
343. The polypeptide of any preceding embodiments, wherein the heterologous linker replaces, e.g., deletes, a portion of (i) and (iii).
344. The polypeptide of any preceding embodiments, wherein the heterologous linker replaces, e.g., deletes, a portion of (ii) and (iii).
345. The polypeptide of any preceding embodiments, wherein the heterologous linker replaces, e.g., deletes, the endogenous linker connecting (i) and (ii).
346. The polypeptide of any preceding embodiments, wherein the heterologous linker replaces, e.g., deletes, the endogenous linker connecting (i) and (iii).
347. The polypeptide of any preceding embodiments, wherein the heterologous linker replaces, e.g., deletes, the endogenous linker connecting (ii) and (iii).
348. The polypeptide of any preceding embodiments, wherein the heterologous linker comprises an amino acid sequence having at least 70%, 75%, 80%, 85%, 90%, 95%, 96%, 97%, 98%, 99%, or 100% sequence identity to the amino acid sequence SGSETPGTSESATPES (SEQ ID NO: 1023) or GGGS (SEQ ID NO: 1024).
349. The polypeptide of any preceding embodiments, wherein the heterologous linker comprises at least 1, 2, 3, 4, 5, 6, 7, 8, 9, 10, 11, 12, 13, 14, 15, 16, 17, 18, 19, 20, 25, 30, 35, 40, 45, 50, 60, 70, 80, 90, 100, 125, 150, 200, 300, 400, or 500 amino acids.
350. A nucleic acid encoding the polypeptide of any preceding numbered embodiment.
351. A vector comprising the nucleic acid of any preceding embodiments.
352. A host cell comprising the nucleic acid of any preceding embodiments.
353. A host cell comprising the polypeptide of any preceding numbered embodiment.
354. A host cell comprising the vector of any preceding embodiments.
355. A pharmaceutical composition, comprising any preceding numbered system, nucleic acid, polypeptide, or vector; and a pharmaceutically acceptable excipient or carrier.
356. The pharmaceutical composition of Any preceding embodiments, wherein the pharmaceutically acceptable excipient or carrier is selected from a vector (e.g., a viral or plasmid vector), a vesicle (e.g., a liposome, an exosome, a natural or synthetic lipid bilayer), a lipid nanoparticle.
357. A polypeptide of any of the preceding embodiments, wherein the polypeptide further comprises a nuclear localization sequence.
358. Any preceding numbered embodiment, wherein the polypeptide comprises an amino acid sequence having at least 70%, 75%, 80%, 85%, 90%, 95%, 96%, 97%, 98%, 99%, or 100% sequence identity to the amino acid sequence SGSETPGTSESATPES (SEQ ID NO: 1023) or GGGS (SEQ ID NO: 1024).
359. Any preceding numbered embodiment, wherein the reverse transcriptase domain comprises an amino acid sequence having at least 70%, 75%, 80%, 85%, 90%, 95%, 96%, 97%, 98%, 99%, or 100% sequence identity to the amino acid sequence SGSETPGTSESATPES (SEQ ID NO: 1023) or GGGS (SEQ ID NO: 1024).
360. Any preceding numbered embodiment, wherein the retrotransposase comprises an amino acid sequence having at least 70%, 75%, 80%, 85%, 90%, 95%, 96%, 97%, 98%, 99%, or 100% sequence identity to the amino acid sequence SGSETPGTSESATPES (SEQ ID NO: 1023) or GGGS (SEQ ID NO: 1024).
361. Any preceding numbered embodiment, wherein the polypeptide, reverse transcriptase domain, or retrotransposase comprises a linker comprising an amino acid sequence having at least 70%, 75%, 80%, 85%, 90%, 95%, 96%, 97%, 98%, 99%, or 100% sequence identity to the amino acid sequence SGSETPGTSESATPES (SEQ ID NO: 1023) or GGGS (SEQ ID NO: 1024).
362. Any preceding numbered embodiment, wherein the polypeptide comprises a DNA binding domain covalently attached to the remainder of the polypeptide by a linker, e.g., a linker comprising at least 1, 2, 3, 4, 5, 6, 7, 8, 9, 10, 11, 12, 13, 14, 15, 16, 17, 18, 19, 20, 25, 30, 35, 40, 45, 50, 60, 70, 80, 90, 100, 125, 150, 200, 300, 400, or 500 amino acids.
363. Any preceding embodiments, wherein the linker is attached to the remainder of the polypeptide at a position in the DNA binding domain, RNA binding domain, reverse transcriptase domain, or endonuclease domain.
364. Any preceding embodiments, wherein the linker is attached to the remainder of the polypeptide at a position in the N-terminal side of an alpha helical region of the polypeptide, e.g., at a position corresponding to version v1 as described in Example 26 of PCT/US2019/048607, incorporated herein by reference.
365. Any preceding embodiments, wherein the linker is attached to the remainder of the polypeptide at a position in the C-terminal side of an alpha helical region of the polypeptide, e.g., preceding an RNA binding motif (e.g., a −1 RNA binding motif), e.g., at a position corresponding to version v2 as described in Example 26 of PCT/US2019/048607, incorporated herein by reference.
366. Any preceding embodiments, wherein the linker is attached to the remainder of the polypeptide at a position in the C-terminal side of a random coil region of the polypeptide, e.g., N-terminal relative to a DNA binding motif (e.g., a c-myb DNA binding motif), e.g., at a position corresponding to version v3 as described in Example 26 of PCT/US2019/048607, incorporated herein by reference.
367. Any preceding embodiments, wherein the linker comprises an amino acid sequence having at least 70%, 75%, 80%, 85%, 90%, 95%, 96%, 97%, 98%, 99%, or 100% sequence identity to the amino acid sequence SGSETPGTSESATPES (SEQ ID NO: 1023) or GGGS (SEQ ID NO: 1024).
368. Any preceding numbered embodiment, wherein a polynucleotide sequence comprising at least about 500, 1000, 2000, 3000, 3500, 3600, 3700, 3800, 3900, or 4000 contiguous nucleotides from the 5′ end of the template RNA sequence are integrated into a target cell genome.
369. Any preceding numbered embodiment, wherein a polynucleotide sequence comprising at least about 500, 1000, 2000, 2500, 2600, 2700, 2800, 2900, or 3000 contiguous nucleotides from the 3′ end of the template RNA sequence are integrated into a target cell genome.
370. Any preceding numbered embodiment, wherein the nucleic acid sequence of the template RNA, or a portion thereof (e.g., a portion comprising at least about 100, 200, 300, 400, 500, 1000, 2000, 2500, 3000, 3500, or 4000 nucleotides) integrates into the genomes of a population of target cells at a copy number of at least about 0.21, 0.3, 0.4, 0.5, 0.6, 0.7, 0.8, 0.9, or 1.0 integrants/genome.
371. Any preceding numbered embodiment, wherein the nucleic acid sequence of the template RNA, or a portion thereof (e.g., a portion comprising at least about 100, 200, 300, 400, 500, 1000, 2000, 2500, 3000, 3500, or 4000 nucleotides) integrates into the genomes of a population of target cells at a copy number of at least about 0.085, 0.09, 0.1, 0.15, or 0.2 integrants/genome.
372. Any preceding numbered embodiment, wherein the nucleic acid sequence of the template RNA, or a portion thereof (e.g., a portion comprising at least about 100, 200, 300, 400, 500, 1000, 2000, 2500, 3000, 3500, or 4000 nucleotides) integrates into the genomes of a population of target cells at a copy number of at least about 0.036, 0.04, 0.05, 0.06, 0.07, or 0.08 integrants/genome.
373. Any preceding numbered embodiment, wherein the polypeptide comprises a functional endonuclease domain (e.g., wherein the endonuclease domain does not comprise a mutation that abolishes endonuclease activity, e.g., as described herein).
374. Any preceding numbered embodiment, wherein the polypeptide comprises an amino acid sequence having at least 70%, 75%, 80%, 85%, 90%, 95%, 96%, 97%, 98%, 99%, or 100% sequence identity to the R2 polypeptide from a medium ground finch, e.g., Geospiza fortis (e.g., as described herein), or a functional fragment thereof.
375. Any preceding numbered embodiment, wherein the polypeptide comprises an amino acid sequence of the R2 polypeptide from a medium ground finch, e.g., Geospiza fortis (e.g., as described herein), or a functional fragment thereof, and further comprises a number of substitutions relative to the the sequence the natural sequence, e.g., at least 1, 2, 3, 4, 5, 10, 20, 30, 40, 50, 60, 70, 80, 90, or 100 substitutions.
376. Any preceding numbered embodiment, wherein the reverse transcriptase domain comprises an amino acid sequence having at least 70%, 75%, 80%, 85%, 90%, 95%, 96%, 97%, 98%, 99%, or 100% sequence identity to the R2 polypeptide from a medium ground finch, e.g., Geospiza fortis (e.g., as described herein), or a functional fragment thereof.
377. Any preceding numbered embodiment, wherein the reverse transcriptase domain comprises an amino acid sequence of the R2 polypeptide from a medium ground finch, e.g., Geospiza fortis (e.g., as described herein), or a functional fragment thereof and further comprises a number of substitutions relative to the the sequence the natural sequence, e.g., at least 1, 2, 3, 4, 5, 10, 20, 30, 40, 50, 60, 70, 80, 90, or 100 substitutions.
378. Any preceding numbered embodiment, wherein the retrotransposase comprises an amino acid sequence having at least 70%, 75%, 80%, 85%, 90%, 95%, 96%, 97%, 98%, 99%, or 100% sequence identity to the R2 polypeptide from a medium ground finch, e.g., Geospiza fortis (e.g., as described herein), or a functional fragment thereof.
379. Any preceding numbered embodiment, wherein the retrotransposase comprises an amino acid sequence of the R2 polypeptide from a medium ground finch, e.g., Geospiza fortis (e.g., as described herein), or a functional fragment thereof and further comprises a number of substitutions relative to the the sequence the natural sequence, e.g., at least 1, 2, 3, 4, 5, 10, 20, 30, 40, 50, 60, 70, 80, 90, or 100 substitutions.
380. Any preceding embodiments, wherein the nucleic acid sequence of the template RNA, or a portion thereof (e.g., a portion comprising at least about 100, 200, 300, 400, 500, 1000, 2000, 2500, 3000, 3500, or 4000 nucleotides) integrates into the genomes of a population of target cells at a copy number of at least about 0.21 integrants/genome.
381. Any preceding numbered embodiment, wherein the polypeptide comprises an amino acid sequence having at least 70%, 75%, 80%, 85%, 90%, 95%, 96%, 97%, 98%, 99%, or 100% sequence identity to the R4 polypeptide from a large roundworm, e.g., Ascaris lumbricoides (e.g., as described herein), or a functional fragment thereof.
382. Any preceding numbered embodiment, wherein the polypeptide comprises an amino acid sequence of the R4 polypeptide from a large roundworm, e.g., Ascaris lumbricoides (e.g., as described herein), or a functional fragment thereof, and further comprises a number of substitutions relative to the the sequence the natural sequence, e.g., at least 1, 2, 3, 4, 5, 10, 20, 30, 40, 50, 60, 70, 80, 90, or 100 substitutions.
383. Any preceding numbered embodiment, wherein the reverse transcriptase domain comprises an amino acid sequence having at least 70%, 75%, 80%, 85%, 90%, 95%, 96%, 97%, 98%, 99%, or 100% sequence identity to the R4 polypeptide from a large roundworm, e.g., Ascaris lumbricoides (e.g., as described herein), or a functional fragment thereof.
384. Any preceding numbered embodiment, wherein the reverse transcriptase domain comprises an amino acid sequence of the R4 polypeptide from a large roundworm, e.g., Ascaris lumbricoides (e.g., as described herein), or a functional fragment thereof and further comprises a number of substitutions relative to the the sequence the natural sequence, e.g., at least 1, 2, 3, 4, 5, 10, 20, 30, 40, 50, 60, 70, 80, 90, or 100 substitutions.
385. Any preceding numbered embodiment, wherein the retrotransposase comprises an amino acid sequence having at least 70%, 75%, 80%, 85%, 90%, 95%, 96%, 97%, 98%, 99%, or 100% sequence identity to the R4 polypeptide from a large roundworm, e.g., Ascaris lumbricoides (e.g., as described herein), or a functional fragment thereof.
386. Any preceding numbered embodiment, wherein the retrotransposase comprises an amino acid sequence of the R4 polypeptide from a large roundworm, e.g., Ascaris lumbricoides (e.g., as described herein), or a functional fragment thereof and further comprises a number of substitutions relative to the the sequence the natural sequence, e.g., at least 1, 2, 3, 4, 5, 10, 20, 30, 40, 50, 60, 70, 80, 90, or 100 substitutions.
387. Any preceding embodiments, wherein the nucleic acid sequence of the template RNA, or a portion thereof (e.g., a portion comprising at least about 100, 200, 300, 400, 500, 1000, 2000, 2500, 3000, 3500, or 4000 nucleotides) integrates into the genomes of a population of target cells at a copy number of at least about 0.085 integrants/genome.
388. Any preceding numbered embodiment, wherein introduction of the system into a target cell does not result in alteration (e.g., upregulation) of p53 and/or p21 protein levels, H2AX phosphorylation (e.g., gamma H2AX), ATM phosphorylation, ATR phosphorylation, Chk1 phosphorylation, Chk2 phosphorylation, and/or p53 phosphorylation.
389. Any preceding numbered embodiment, wherein introduction of the system into a target cell results in upregulation of p53 protein level in the target cell to a level that is less than about 0.001%, 0.005%, 0.01%, 0.05%, 0.1%, 0.5%, 1%, 2%, 3%, 4%, 5%, 6%, 7%, 8%, 9%, 10%, 15%, 20%, 30%, 40%, 45%, 50%, 55%, 60%, 70%, 80%, or 90% of the p53 protein level induced by introducing a site-specific nuclease, e.g., Cas9, that targets the same genomic site as said system.
390. Any preceding embodiments, wherein the p53 protein level is determined according to the method described in Example 30 of PCT/US2019/048607, incorporated herein by reference.
391. Any preceding numbered embodiment, wherein introduction of the system into a target cell results in upregulation of p53 phosphorylation level in the target cell to a level that is less than about 0.001%, 0.005%, 0.01%, 0.05%, 0.1%, 0.5%, 1%, 2%, 3%, 4%, 5%, 6%, 7%, 8%, 9%, 10%, 15%, 20%, 30%, 40%, 45%, 50%, 55%, 60%, 70%, 80%, or 90% of the p53 phosphorylation level induced by introducing a site-specific nuclease, e.g., Cas9, that targets the same genomic site as said system.
392. Any preceding numbered embodiment, wherein introduction of the system into a target cell results in upregulation of p21 protein level in the target cell to a level that is less than about 0.001%, 0.005%, 0.01%, 0.05%, 0.1%, 0.5%, 1%, 2%, 3%, 4%, 5%, 6%, 7%, 8%, 9%, 10%, 15%, 20%, 30%, 40%, 45%, 50%, 55%, 60%, 70%, 80%, or 90% of the p53 protein level induced by introducing a site-specific nuclease, e.g., Cas9, that targets the same genomic site as said system.
393. Any preceding embodiments, wherein the p21 protein level is determined according to the method described in Example 30 of PCT/US2019/048607, incorporated herein by reference.
394. Any preceding numbered embodiment, wherein introduction of the system into a target cell results in upregulation of H2AX phosphorylation level in the target cell to a level that is less than about 0.001%, 0.005%, 0.01%, 0.05%, 0.1%, 0.5%, 1%, 2%, 3%, 4%, 5%, 6%, 7%, 8%, 9%, 10%, 15%, 20%, 30%, 40%, 45%, 50%, 55%, 60%, 70%, 80%, or 90% of the H2AX phosphorylation level induced by introducing a site-specific nuclease, e.g., Cas9, that targets the same genomic site as said system.
395. Any preceding numbered embodiment, wherein introduction of the system into a target cell results in upregulation of ATM phosphorylation level in the target cell to a level that is less than about 0.001%, 0.005%, 0.01%, 0.05%, 0.1%, 0.5%, 1%, 2%, 3%, 4%, 5%, 6%, 7%, 8%, 9%, 10%, 15%, 20%, 30%, 40%, 45%, 50%, 55%, 60%, 70%, 80%, or 90% of the ATM phosphorylation level induced by introducing a site-specific nuclease, e.g., Cas9, that targets the same genomic site as said system.
396. Any preceding numbered embodiment, wherein introduction of the system into a target cell results in upregulation of ATR phosphorylation level in the target cell to a level that is less than about 0.001%, 0.005%, 0.01%, 0.05%, 0.1%, 0.5%, 1%, 2%, 3%, 4%, 5%, 6%, 7%, 8%, 9%, 10%, 15%, 20%, 30%, 40%, 45%, 50%, 55%, 60%, 70%, 80%, or 90% of the ATR phosphorylation level induced by introducing a site-specific nuclease, e.g., Cas9, that targets the same genomic site as said system.
397. Any preceding numbered embodiment, wherein introduction of the system into a target cell results in upregulation of Chk1 phosphorylation level in the target cell to a level that is less than about 0.001%, 0.005%, 0.01%, 0.05%, 0.1%, 0.5%, 1%, 2%, 3%, 4%, 5%, 6%, 7%, 8%, 9%, 10%, 15%, 20%, 30%, 40%, 45%, 50%, 55%, 60%, 70%, 80%, or 90% of the Chk1 phosphorylation level induced by introducing a site-specific nuclease, e.g., Cas9, that targets the same genomic site as said system.
398. Any preceding numbered embodiment, wherein introduction of the system into a target cell results in upregulation of Chk2 phosphorylation level in the target cell to a level that is less than about 0.001%, 0.005%, 0.01%, 0.05%, 0.1%, 0.5%, 1%, 2%, 3%, 4%, 5%, 6%, 7%, 8%, 9%, 10%, 15%, 20%, 30%, 40%, 45%, 50%, 55%, 60%, 70%, 80%, or 90% of the Chk2 phosphorylation level induced by introducing a site-specific nuclease, e.g., Cas9, that targets the same genomic site as said system.
399. A system for modifying DNA comprising:
(a) a polypeptide or a nucleic acid encoding the polypeptide, wherein the polypeptide comprises (i) a reverse transcriptase (RT) domain, (ii) a DNA-binding domain (DBD); and (iii) an endonuclease domain, e.g., a nickase domain; and
(b) a template RNA (or DNA encoding the template RNA) comprising (e.g., from 5′ to 3′) (i) optionally a sequence (e.g., a CRISPR spacer) that binds a target site (e.g., a non-edited strand of a site in a target genome), (ii) optionally a sequence that binds the polypeptide, (iii) a heterologous object sequence, and (iv) a 3′ homology domain.
400. A system for modifying DNA comprising:
(a) a polypeptide or a nucleic acid encoding the polypeptide, wherein the polypeptide comprises (i) a reverse transcriptase (RT) domain, (ii) a DNA-binding domain (DBD); and (iii) an endonuclease domain, e.g., a nickase domain; and
(b) a template RNA (or DNA encoding the template RNA) comprising (e.g., from 5′ to 3′) (i) optionally a sequence that binds a target site (e.g., a non-edited strand of a site in a target genome), (ii) optionally a sequence that binds the polypeptide, (iii) a heterologous object sequence, and (iv) a 3′ homology domain,
wherein the RT domain has a sequence of Table 1 or 3, or of a protein domain listed in Table 2, or a sequence having at least 70%, 75%, 80%, 85%, 90%, 95%, 96%, 97%, 98%, or 99% identity thereto.
411. A system for modifying DNA comprising:
(a) a polypeptide or a nucleic acid encoding the polypeptide, wherein the polypeptide comprises (i) a reverse transcriptase (RT) domain, (ii) a DNA-binding domain (DBD); and (iii) an endonuclease domain, e.g., a nickase domain; and
(b) a template RNA (etRNA) (or DNA encoding the template RNA) comprising (e.g., from 5′ to 3′) (i) optionally a sequence that binds a target site (e.g., a non-edited strand of a site in a target genome), (ii) optionally a sequence that binds the polypeptide, (iii) a heterologous object sequence, and (iv) a 3′ homology domain,
wherein the system is capable of producing an insertion into the target site of at least 45, 50, 55, 60, 65, 70, 75, 80, 85, 90, 95, or 100 nucleotides.
412. A system for modifying DNA comprising:
(a) a polypeptide or a nucleic acid encoding the polypeptide, wherein the polypeptide comprises (i) a reverse transcriptase (RT) domain, (ii) a DNA-binding domain (DBD); and (iii) an endonuclease domain, e.g., a nickase domain; and
(b) a template RNA (or DNA encoding the template RNA) comprising (e.g., from 5′ to 3′) (i) optionally a sequence that binds a target site (e.g., a non-edited strand of a site in a target genome), (ii) optionally a sequence that binds the polypeptide, (iii) a heterologous object sequence, and (iv) a 3′ homology domain,
wherein the heterologous object sequence is at least 74, 75, 76, 77, 78, 79, 80, 81, 82, 83, 84, 85, 86, 87, 88, 89, 90, 91, 92, 93, 94, 95, 96, 97, 98, 99, 100, 120, 140, 160, 180, 200, 500, or 1,000 nts in length.
413. The system of any any preceding embodiments, wherein one or more of: the RT domain is heterologous to the DBD; the DBD is heterologous to the endonuclease domain; or the RT domain is heterologous to the endonuclease domain.
414. A system for modifying DNA comprising:
(a) a polypeptide or a nucleic acid encoding the polypeptide, wherein the polypeptide comprises (i) a reverse transcriptase (RT) domain, (ii) a DNA-binding domain (DBD); and (iii) an endonuclease domain, e.g., a nickase domain; and
(b) a template RNA (or DNA encoding the template RNA) comprising (e.g., from 5′ to 3′) (i) optionally a sequence that binds a target site (e.g., a non-edited strand of a site in a target genome), (ii) optionally a sequence that binds the polypeptide, (iii) a heterologous object sequence, and (iv) a 3′ homology domain,
wherein the system is capable of producing a deletion into the target site of at least 81, 85, 90, 95, 100, 110, 120, 130, 140, 150, 160, 170, 180, 190, or 200 nucleotides.
415. A system for modifying DNA comprising:
(a) a polypeptide or a nucleic acid encoding the polypeptide, wherein the polypeptide comprises (i) a reverse transcriptase (RT) domain, (ii) a DNA-binding domain (DBD); and (iii) an endonuclease domain, e.g., a nickase domain; and
(b) a template (or DNA encoding the template RNA) comprising (e.g., from 5′ to 3′) (i) optionally a sequence that binds a target site (e.g., a non-edited strand of a site in a target genome), (ii) optionally a sequence that binds the polypeptide, (iii) a heterologous object sequence, and (iv) a 3′ homology domain,
wherein (a)(ii) and/or (a)(iii) comprises a TALE molecule; a zinc finger molecule; or a CRISPR/Cas molecule; or a functional variant (e.g., mutant) thereof.
416. A system for modifying DNA comprising:
(a) a polypeptide or a nucleic acid encoding the polypeptide, wherein the polypeptide comprises (i) a reverse transcriptase (RT) domain, (ii) a DNA-binding domain (DBD); and (iii) an endonuclease domain, e.g., a nickase domain; and
(b) a template RNA (or DNA encoding the template RNA) comprising (e.g., from 5′ to 3′) (i) optionally a sequence (e.g., a CRISPR spacer) that binds a target site (e.g., a non-edited strand of a site in a target genome), (ii) optionally a sequence that binds the polypeptide, (iii) a heterologous object sequence, and (iv) a 3′ homology domain,
wherein the endonuclease domain, e.g., nickase domain, cuts both strands of the target site DNA, and wherein the cuts are separated from one another by at least 2, 3, 4, 5, 6, 7, 8, 9, 10, 15, 20, or 30 nucleotides.
417. A system for modifying DNA comprising:
(a) a polypeptide or a nucleic acid encoding the polypeptide, wherein the polypeptide comprises (i) a reverse transcriptase (RT) domain, (ii) a DNA-binding domain (DBD); and (iii) an endonuclease domain, e.g., a nickase domain; and
(b) a template RNA (or DNA encoding the template RNA) comprising (e.g., from 5′ to 3′) (i) optionally a sequence that binds a target site (e.g., a non-edited strand of a site in a target genome), (ii) a sequence that specifically binds the RT domain, (iii) a heterologous object sequence, and (iv) a 3′ homology domain.
418. The system of any preceding embodiments, wherein the template RNA further comprises a sequence that binds (a)(ii) and/or (a)(iii).
419. A system for modifying DNA comprising:
(a) a first polypeptide or a nucleic acid encoding the first polypeptide, wherein the first polypeptide comprises (i) a reverse transcriptase (RT) domain and (ii) optionally a DNA-binding domain,
(b) a second polypeptide or a nucleic acid encoding the second polypeptide, wherein the second polypeptide comprises (i) a DNA-binding domain (DBD); (ii) an endonuclease domain, e.g., a nickase domain; and
(c) a template RNA (or DNA encoding the template RNA) comprising (e.g., from 5′ to 3′) (i) optionally a sequence that binds the second polypeptide (e.g., that binds (b)(i) and/or (b)(ii)), (ii) optionally a sequence that binds the first polypeptide (e.g., that specifically binds the RT domain), (iii) a heterologous object sequence, and (iv) a 3′ homology domain.
420. A system for modifying DNA comprising:
(a) a polypeptide or a nucleic acid encoding the polypeptide, wherein the polypeptide comprises (i) a reverse transcriptase (RT) domain, and (ii) a DNA-binding domain (DBD); and (iii) an endonuclease domain, e.g., a nickase domain;
(b) a first template RNA (or DNA encoding the RNA) comprising (e.g., from 5′ to 3′) (i) a sequence that binds the polypeptide (e.g., that binds (a)(ii) and/or (a)(iii)) and (ii) a sequence that binds a target site (e.g., a non-edited strand of a site in a target genome), (e.g., wherein the first RNA comprises a gRNA);
(c) a second template RNA (or DNA encoding the RNA) comprising (e.g., from 5′ to 3′) (i) optionally a sequence that binds the polypeptide (e.g., that specifically binds the RT domain), (ii) a heterologous object sequence, and (iii) a 3′ homology domain.
421 The system of any preceding embodiments, wherein the second template RNA comprises (i).
422 The system of any preceding embodiments, wherein the first template RNA comprises a first conjugating domain and the second template RNA comprises a second conjugating domain.
423 The system of any preceding embodiments, wherein the first and second conjugating domains are capable of hybridizing to one another, e.g., under stringent conditions.
424 The system of any preceding embodiments, wherein association of the first conjugating domain and the second conjugating domain colocalizes the first template RNA and the second template RNA.
425. The system of any previous embodiment, wherein the template RNA comprises (i).
426. The system of any previous embodiment, wherein the template RNA comprises (ii).
427. The system of any previous embodiment, wherein the template RNA comprises (i) and (ii).
428. A template RNA (or DNA encoding the template RNA) comprising a targeting domain (e.g., a heterologous targeting domain) that binds specifically to a sequence comprised in the target DNA molecule (e.g., a genomic DNA), a sequence that specifically binds an RT domain of a polypeptide, and a heterologous object sequence.
429. The system, method, or template RNA of any of the preceding embodiments, wherein the polypeptide comprises a heterologous targeting domain that binds specifically to a sequence comprised in the target DNA molecule (e.g., a genomic DNA).
430. The system, method, or template RNA of any preceding embodiments, wherein the heterologous targeting domain binds to a different nucleic acid sequence than the unmodified polypeptide.
431. The system, method, or template RNA of any preceding embodiments, wherein the polypeptide does not comprise a functional endogenous targeting domain (e.g., wherein the polypeptide does not comprise an endogenous targeting domain).
432. The system, method, or template RNA of any preceding embodiments, wherein the heterologous targeting domain comprises a zinc finger (e.g., a zinc finger that binds specifically to the sequence comprised in the target DNA molecule).
433. The system, method, or template RNA of any preceding embodiments, wherein the heterologous targeting domain comprises a Cas domain (e.g., a Cas9 domain, or a mutant or variant thereof, e.g., a Cas9 domain that binds specifically to the sequence comprised in the target DNA molecule).
434. The system, method, or template RNA of any preceding embodiments, wherein the Cas domain is associated with a guide RNA (gRNA).
435. The system, method, or template RNA of any preceding embodiments, wherein the heterologous targeting domain comprises an endonuclease domain (e.g., a heterologous endonuclease domain).
436. The system, method, or template RNA of any preceding embodiments, wherein the endonuclease domain comprises a Cas domain (e.g., a Cas9 or a mutant or variant thereof).
437. The system, method, or template RNA of any preceding embodiments, wherein the Cas domain is associated with a guide RNA (gRNA).
438. The system, method, or template RNA of any preceding embodiments, wherein the endonuclease domain comprises a Fok1 domain.
439. The system, method, or template RNA of any any preceding embodiments, wherein the template nucleic acid molecule comprises at least one (e.g., one or two) heterologous homology sequence having at least 85%, 90%, 95%, 96%, 97%, 98%, 99%, or 100% homology to a sequence comprised in a target DNA molecule (e.g., a genomic DNA).
440. The system, method, or template RNA of any preceding embodiments, wherein one of the at least one heterologous homology sequences is positioned at or within about 1, 2, 3, 4, 5, 6, 7, 8, 9, 10, 15, 20, 25, 30, 35, 40, 45, 50, 60, 70, 80, 90, or 100 nucleotides of the 5′ end of the template nucleic acid molecule.
441. The system, method, or template RNA of any preceding embodiments, wherein one of the at least one heterologous homology sequences is positioned at or within about 1, 2, 3, 4, 5, 6, 7, 8, 9, 10, 15, 20, 25, 30, 35, 40, 45, 50, 60, 70, 80, 90, or 100 nucleotides of the 3′ end of the template nucleic acid molecule.
442. The system, method, or template RNA of any preceding embodiments, wherein the heterologous homology sequence binds within 1, 2, 3, 4, 5, 6, 7, 8, 9, or 10 nucleotides of a nick site (e.g., produced by a nickase, e.g., an endonuclease domain, e.g., as described herein) in the target DNA molecule.
443. The system, method, or template RNA of any preceding embodiments, wherein the heterologous homology sequence has less than 50%, 40%, 30%, 20%, 10%, 5%, 4%, 3%, 2%, or 1% sequence identity with a nucleic acid sequence complementary to an endogenous homology sequence of an unmodified form of the template RNA.
444. The system, method, or template RNA of any preceding embodiments, wherein the heterologous homology sequence has having at least 85%, 90%, 95%, 96%, 97%, 98%, 99%, or 100% homology to a sequence of the target DNA molecule that is different the sequence bound by an endogenous homology sequence (e.g., replaced by the heterologous homology sequence).
445. The system, method, or template RNA of any preceding embodiments, wherein the heterologous homology sequence comprises a sequence (e.g., at its 3′ end) having at least 85%, 90%, 95%, 96%, 97%, 98%, 99%, or 100% homology to a sequence positioned 5′ to a nick site of the target DNA molecule (e.g., a site nicked by a nickase, e.g., an endonuclease domain as described herein).
446. The system, method, or template RNA of any preceding embodiments, wherein the heterologous homology sequence comprises a sequence (e.g., at its 5′ end) suitable for priming target-primed reverse transcription (TPRT) initiation.
447. The system, method, or template RNA of any preceding embodiments, wherein the heterologous homology sequence has at least 85%, 90%, 95%, 96%, 97%, 98%, 99%, or 100% homology to a sequence positioned within about 1, 2, 3, 4, 5, 6, 7, 8, 9, 10, 15, 20, 25, 30, 35, 40, 45, 50, 60, 70, 80, 90, or 100 nucleotides of (e.g., 3′ relative to) a target insertion site, e.g., for a heterologous object sequence (e.g., as described herein), in the target DNA molecule.
448. The system, method, or template RNA of any preceding embodiments, wherein the template nucleic acid molecule comprises a guide RNA (gRNA), e.g., as described herein.
449. The system, method, or template RNA of any preceding embodiments, wherein the template nucleic acid molecule comprises a gRNA spacer sequence (e.g., at or within 1, 2, 3, 4, 5, 10, 15, 20, 25, 30, 40, 50, 60, 70, 80, 90, or 100 nucleotides of its 5′ end).
450. A template RNA (or DNA encoding the template RNA) comprising (e.g., from 5′ to 3′) (i) a sequence that binds a target site (e.g., a second strand of a site in a target genome), (ii) a sequence that specifically binds an RT domain of a polypeptide, (iii) a heterologous object sequence, and (iv) a 3′ target homology domain.
451. The template RNA of any preceding embodiments, further comprising (v) a sequence that binds an endonuclease and/or a DNA-binding domain of a polypeptide (e.g., the same polypeptide comprising the RT domain).
452. The template RNA of any preceding embodiments, wherein the RT domain comprises a sequence selected of Table 1 or 3 or a sequence of a reverse transcriptase domain of Table 2 or a sequence that has at least 70%, 75%, 80%, 85%, 90%, 95%, 96%, 97%, 98%, or 99% identity thereto.
453. The template RNA of any preceding embodiments, wherein the RT domain comprises a sequence selected of Table 1 or 3 or a sequence of a reverse transcriptase domain of Table 2, wherein the RT domain further comprises a number of substitutions relative to the natural sequence, e.g., at least 1, 2, 3, 4, 5, 10, 20, 30, 40, 50, 60, 70, 80, 90, or 100 substitutions.
454. The template RNA of any preceding embodiments, wherein the sequence of (ii) specifically binds the RT domain.
455. The template RNA of any preceding embodiments, wherein the sequence that specifically binds the RT domain is a sequence, e.g., a UTR sequence, that binds the RT domain in a wild-type context, or a sequence having at least 70, 75, 80, 85, 90, 95, or 99% identity thereto.
456. A template RNA (or DNA encoding the template RNA) comprising from 5′ to 3′: (ii) a sequence that binds an endonuclease and/or a DNA-binding domain of a polypeptide, (i) a sequence that binds a target site (e.g., a second strand of a site in a target genome), (iii) a heterologous object sequence, and (iv) a 3′ target homology domain.
457. A template RNA (or DNA encoding the template RNA) comprising from 5′ to 3′: (iii) a heterologous object sequence, (iv) a 3′ target homology domain, (i) a sequence that binds a target site (e.g., a second strand of a site in a target genome), and (ii) a sequence that binds an endonuclease and/or a DNA-binding domain of a polypeptide.
458. A template RNA (or DNA encoding the template RNA) comprising (e.g., from 5′ to 3′) (i) optionally a sequence that binds a target site (e.g., a non-edited strand of a site in a target genome), (ii) optionally a sequence that binds an endonuclease and/or a DNA-binding domain of a polypeptide, (iii) a heterologous object sequence, and (iv) a 3′ homology domain.
459. The template RNA of any preceding embodiments, wherein the template RNA comprises (i).
460. The template RNA of any preceding embodiments, wherein the template RNA comprises (ii).
461. A template RNA (or DNA encoding the template RNA) comprising (e.g., from 5′ to 3′) (i) a sequence that binds a target site (e.g., a non-edited strand of a site in a target genome), (ii) a sequence that specifically binds an RT domain of a polypeptide, (iii) a heterologous object sequence, and (iv) a 3′ homology domain.
462. The template RNA of any preceding embodiments, wherein the RT domain comprises a sequence selected of Table 1 or 3, or of a protein domain listed in Table 2 or a sequence that has at least 70%, 75%, 80%, 85%, 90%, 95%, 96%, 97%, 98%, or 99% identity thereto.
463. The template RNA of any preceding embodiments, further comprising (v) a sequence that binds an endonuclease and/or a DNA-binding domain of a polypeptide (e.g., the same polypeptide comprising the RT domain).
464. The template RNA of any preceding embodiments, wherein the sequence of (ii) specifically binds an RT domain of Table 1 or 3, or listed in Table 2, or an RT domain sequence that has at least 70, 75, 80, 85, 90, 95, or 99% identity thereto.
465. The template RNA of any preceding embodiments, wherein the sequence that specifically binds the RT domain is a sequence of Table 1 or 3, or of a protein domain listed in Table 2, or a sequence having at least 70, 75, 80, 85, 90, 95, or 99% identity thereto.
466. A template RNA (or DNA encoding the template RNA) comprising from 5′ to 3′: (ii) a sequence that binds an endonuclease and/or a DNA-binding domain of a polypeptide, (i) a sequence that binds a target site (e.g., a non-edited strand of a site in a target genome), (iii) a heterologous object sequence, and (iv) a 3′ homology domain.
467. A template RNA (or DNA encoding the template RNA) comprising from 5′ to 3′: (iii) a heterologous object sequence, (iv) a 3′ homology domain, (i) a sequence that binds a target site (e.g., a non-edited strand of a site in a target genome), and (ii) a sequence that binds an endonuclease and/or a DNA-binding domain of a polypeptide.
468. The system or template RNA of any preceding embodiments, wherein the template RNA, first template RNA, or second template RNA comprises a sequence that specifically binds the RT domain.
469. The system or template RNA of any preceding embodiments, wherein the sequence that specifically binds the RT domain is disposed between (i) and (ii).
470. The system or template RNA of any preceding embodiments, wherein the sequence that specifically binds the RT domain is disposed between (ii) and (iii).
471. The system or template RNA of any preceding embodiments, wherein the sequence that specifically binds the RT domain is disposed between (iii) and (iv).
472. The system or template RNA of any preceding embodiments, wherein the sequence that specifically binds the RT domain is disposed between (iv) and (i).
473. The system or template RNA of any preceding embodiments, wherein the sequence that specifically binds the RT domain is disposed between (i) and (iii).
474. A system for modifying DNA, comprising:
(a) a first template RNA (or DNA encoding the first template RNA) comprising (i) sequence that binds an endonuclease domain, e.g., a nickase domain, and/or a DNA-binding domain (DBD) of a polypeptide, and (ii) a sequence that binds a target site (e.g., a non-edited strand of a site in a target genome), (e.g., wherein the first RNA comprises a gRNA);
(b) a second template RNA (or DNA encoding the second template RNA) comprising (i) a sequence that specifically binds a reverse transcriptase (RT) domain of a polypeptide (e.g., the polypeptide of (a)), (ii) a target site binding sequence (TSBS), and (iii) an RT template sequence.
475. The system of any preceding embodiments wherein the nucleic acid encoding the first template RNA and the nucleic acid encoding the second template RNA are two separate nucleic acids.
476. The system of any preceding embodiments, wherein the nucleic acid encoding the first template RNA and the nucleic acid encoding the second template RNA are part of the same nucleic acid molecule, e.g., are present on the same vector.
477. A polypeptide or a nucleic acid encoding the polypeptide, wherein the polypeptide comprises (i) a reverse transcriptase (RT) domain, (ii) a DNA-binding domain (DBD); and (iii) an endonuclease domain, e.g., a nickase domain, wherein the RT domain has a sequence of Table 1 or 3, or of a protein domain listed in Table 2, or a sequence having at least 70%, 75%, 80%, 85%, 90%, 95%, 96%, 97%, 98%, or 99% identity thereto.
478. A system for modifying DNA, comprising:

[0094] (a) a first polypeptide or a nucleic acid encoding the polypeptide, wherein the polypeptide comprises a reverse transcriptase (RT) domain, wherein the RT domain has a sequence of Table 1 or 3, or of a protein domain listed in Table 2, or a sequence having at least 70%, 75%, 80%, 85%, 90%, 95%, 96%, 97%, 98%, or 99% identity thereto; and optionally a DNA-binding domain (DBD) (e.g., a first DBD); and

[0095] (b) a second polypeptide or a nucleic acid encoding the polypeptide, wherein the polypeptide comprises (i) a DBD (e.g., a second DBD); and (ii) an endonuclease domain, e.g., a nickase domain.

479. The system of any preceding embodiments, wherein the nucleic acid encoding the first polypeptide and the nucleic acid encoding the second polypeptide are two separate nucleic acids.
480. The system of any preceding embodiments, wherein the nucleic acid encoding the first polypeptide and the nucleic acid encoding the second polypeptide are part of the same nucleic acid molecule, e.g., are present on the same vector.
481. The system, method, kit, template RNA, or reaction mixture of any of the preceding embodiments, wherein an RNA of the system (e.g., template RNA, the RNA encoding the polypeptide of (a), or an RNA expressed from a heterologous object sequence integrated into a target DNA) comprises a microRNA binding site, e.g., in a 3′ UTR.
482. The system, method, kit, template RNA, or reaction mixture of embodiment 481, wherein the microRNA binding site is recognized by a miRNA that is present in a non-target cell type, but that is not present (or is present at a reduced level relative to the non-target cell) in a target cell type.
483. The system, method, kit, template RNA, or reaction mixture of embodiment 481 or 482, wherein the miRNA is miR-142, and/or wherein the non-target cell is a Kupffer cell or a blood cell, e.g., an immune cell.
484. The system, method, kit, template RNA, or reaction mixture of embodiment 481 or 482, wherein the miRNA is miR-182 or miR-183, and/or wherein the non-target cell is a dorsal root ganglion neuron.
485. The system, method, kit, template RNA, or reaction mixture of any of embodiments 481-484, wherein the system comprises a first miRNA binding site that is recognized by a first miRNA (e.g., miR-142) and the system further comprises a second miRNA binding site that is recognized by a second miRNA (e.g., miR-182 or miR-183), wherein the first miRNA binding site and the second miRNA binding site are situated on the same RNA or on different RNAs of the system.
486. The system, method, kit, template RNA, or reaction mixture of any of embodiments 481-485, wherein the template RNA comprises at least 2, 3, or 4 miRNA binding sites, e.g., wherein the miRNA binding sites are recognized by the same or different miRNAs.
487. The system, method, kit, template RNA, or reaction mixture of any of embodiments 481-486, wherein the RNA encoding the polypeptide of (a) comprises at least 2, 3, or 4 miRNA binding sites, e.g., wherein the miRNA binding sites are recognized by the same or different miRNAs.
488. The system, method, kit, template RNA, or reaction mixture of any of embodiments 481-487, wherein the RNA expressed from a heterologous object sequence integrated into a target DNA comprises at least 2, 3, or 4 miRNA binding sites, e.g., wherein the miRNA binding sites are recognized by the same or different miRNAs.

### Definitions

[0096] Domain: The term “domain” as used herein refers to a structure of a biomolecule that contributes to a specified function of the biomolecule. A domain may comprise a contiguous region (e.g., a contiguous sequence) or distinct, non-contiguous regions (e.g., non-contiguous sequences) of a biomolecule. Examples of protein domains include, but are not limited to, an endonuclease domain, a DNA binding domain, a reverse transcription domain; an example of a domain of a nucleic acid is a regulatory domain, such as a transcription factor binding domain.

[0097] Exogenous: As used herein, the term exogenous, when used with reference to a biomolecule (such as a nucleic acid sequence or polypeptide) means that the biomolecule was introduced into a host genome, cell or organism by the hand of man. For example, a nucleic acid that is as added into an existing genome, cell, tissue or subject using recombinant DNA techniques or other methods is exogenous to the existing nucleic acid sequence, cell, tissue or subject.

[0098] First/Second Strand: As used herein, first strand and second strand, as used to describe the individual DNA strands of target DNA, distinguish the two DNA strands based upon which strand the reverse transcriptase domain initiates polymerization, e.g., based upon where target primed synthesis initiates. The first strand refers to the strand of the target DNA upon which the reverse transcriptase domain initiates polymerization, e.g., where target primed synthesis initiates. The second strand refers to the other strand of the target DNA. First and second strand designations do not describe the target site DNA strands in other respects; for example, in some embodiments the first and second strands are nicked by a polypeptide described herein, but the designations ‘first’ and ‘second’ strand have no bearing on the order in which such nicks occur.

[0099] Genomic safe harbor site (GSH site): A genomic safe harbor site is a site in a host genome that is able to accommodate the integration of new genetic material, e.g., such that the inserted genetic element does not cause significant alterations of the host genome posing a risk to the host cell or organism. A GSH site generally meets 1, 2, 3, 4, 5, 6, 7, 8 or 9 of the following criteria: (i) is located >300 kb from a cancer-related gene; (ii) is >300 kb from a miRNA/other functional small RNA; (iii) is >50 kb from a 5′ gene end; (iv) is >50 kb from a replication origin; (v) is >50 kb away from any ultraconservered element; (vi) has low transcriptional activity (i.e. no mRNA+/−25 kb); (vii) is not in copy number variable region; (viii) is in open chromatin; and/or (ix) is unique, with 1 copy in the human genome. Examples of GSH sites in the human genome that meet some or all of these criteria include (i) the adeno-associated virus site 1 (AAVS1), a naturally occurring site of integration of AAV virus on chromosome 19; (ii) the chemokine (C-C motif) receptor 5 (CCR5) gene, a chemokine receptor gene known as an HIV-1 coreceptor; (iii) the human ortholog of the mouse Rosa26 locus; (iv) the rDNA locus (v) the albumin locus, e.g., for liver cell applications; (vi) the T-cell receptor alpha constant (TRAC) locus, e.g., for T-cell applications. Additional GSH sites are known and described, e.g., in Pellenz et al. epub Aug. 20, 2018 (https://doi.org/10.1101/396390).

[0100] Heterologous: The term heterologous, when used to describe a first element in reference to a second element means that the first element and second element do not exist in nature disposed as described. For example, a heterologous polypeptide, nucleic acid molecule, construct or sequence refers to (a) a polypeptide, nucleic acid molecule or portion of a polypeptide or nucleic acid molecule sequence that is not native to a cell in which it is expressed, (b) a polypeptide or nucleic acid molecule or portion of a polypeptide or nucleic acid molecule that has been altered or mutated relative to its native state, or (c) a polypeptide or nucleic acid molecule with an altered expression as compared to the native expression levels under similar conditions. For example, a heterologous regulatory sequence (e.g., promoter, enhancer) may be used to regulate expression of a gene or a nucleic acid molecule in a way that is different than the gene or a nucleic acid molecule is normally expressed in nature. In another example, a heterologous domain of a polypeptide or nucleic acid sequence (e.g., a DNA binding domain of a polypeptide or nucleic acid encoding a DNA binding domain of a polypeptide) may be disposed relative to other domains or may be a different sequence or from a different source, relative to other domains or portions of a polypeptide or its encoding nucleic acid. In certain embodiments, a heterologous nucleic acid molecule may exist in a native host cell genome, but may have an altered expression level or have a different sequence or both. In other embodiments, heterologous nucleic acid molecules may not be endogenous to a host cell or host genome but instead may have been introduced into a host cell by transformation (e.g., transfection, electroporation), wherein the added molecule may integrate into the host genome or can exist as extra-chromosomal genetic material either transiently (e.g., mRNA) or semi-stably for more than one generation (e.g., episomal viral vector, plasmid or other self-replicating vector).

[0101] Mutation or Mutated: The term “mutated” when applied to nucleic acid sequences means that nucleotides in a nucleic acid sequence may be inserted, deleted or changed compared to a reference (e.g., native) nucleic acid sequence. A single alteration may be made at a locus (a point mutation) or multiple nucleotides may be inserted, deleted or changed at a single locus. In addition, one or more alterations may be made at any number of loci within a nucleic acid sequence. A nucleic acid sequence may be mutated by any method known in the art.

[0102] Nucleic acid molecule: Nucleic acid molecule refers to both RNA and DNA molecules including, without limitation, cDNA, genomic DNA and mRNA, and also includes synthetic nucleic acid molecules, such as those that are chemically synthesized or recombinantly produced, such as RNA templates, as described herein. The nucleic acid molecule can be double-stranded or single-stranded, circular or linear. If single-stranded, the nucleic acid molecule can be the sense strand or the antisense strand. Unless otherwise indicated, and as an example for all sequences described herein under the general format “SEQ. ID NO:” “nucleic acid comprising SEQ. ID NO:1” refers to a nucleic acid, at least a portion which has either (i) the sequence of SEQ. ID NO:1, or (ii) a sequence complimentary to SEQ. ID NO:1. The choice between the two is dictated by the context in which SEQ. ID NO:1 is used. For instance, if the nucleic acid is used as a probe, the choice between the two is dictated by the requirement that the probe be complimentary to the desired target. Nucleic acid sequences of the present disclosure may be modified chemically or biochemically or may contain non-natural or derivatized nucleotide bases, as will be readily appreciated by those of skill in the art. Such modifications include, for example, labels, methylation, substitution of one or more naturally occurring nucleotides with an analog, inter-nucleotide modifications such as uncharged linkages (for example, methyl phosphonates, phosphotriesters, phosphoramidates, carbamates, etc.), charged linkages (for example, phosphorothioates, phosphorodithioates, etc.), pendant moieties, (for example, polypeptides), intercalators (for example, acridine, psoralen, etc.), chelators, alkylators, and modified linkages (for example, alpha anomeric nucleic acids, etc.). Also included are synthetic molecules that mimic polynucleotides in their ability to bind to a designated sequence via hydrogen bonding and other chemical interactions. Such molecules are known in the art and include, for example, those in which peptide linkages substitute for phosphate linkages in the backbone of a molecule. Other modifications can include, for example, analogs in which the ribose ring contains a bridging moiety or other structure such as modifications found in “locked” nucleic acids.

[0103] Gene expression unit: a gene expression unit is a nucleic acid sequence comprising at least one regulatory nucleic acid sequence operably linked to at least one effector sequence. A first nucleic acid sequence is operably linked with a second nucleic acid sequence when the first nucleic acid sequence is placed in a functional relationship with the second nucleic acid sequence. For instance, a promoter or enhancer is operably linked to a coding sequence if the promoter or enhancer affects the transcription or expression of the coding sequence. Operably linked DNA sequences may be contiguous or non-contiguous. Where necessary to join two protein-coding regions, operably linked sequences may be in the same reading frame.

[0104] Host: The terms host genome or host cell, as used herein, refer to a cell and/or its genome into which protein and/or genetic material has been introduced. It should be understood that such terms are intended to refer not only to the particular subject cell and/or genome, but to the progeny of such a cell and/or the genome of the progeny of such a cell. Because certain modifications may occur in succeeding generations due to either mutation or environmental influences, such progeny may not, in fact, be identical to the parent cell, but are still included within the scope of the term “host cell” as used herein. A host genome or host cell may be an isolated cell or cell line grown in culture, or genomic material isolated from such a cell or cell line, or may be a host cell or host genome which composing living tissue or an organism. In some instances, a host cell may be an animal cell or a plant cell, e.g., as described herein. In certain instances, a host cell may be a bovine cell, horse cell, pig cell, goat cell, sheep cell, chicken cell, or turkey cell. In certain instances, a host cell may be a corn cell, soy cell, wheat cell, or rice cell.

[0105] Operative association: As used herein, “operative association” describes a functional relationship between two nucleic acid sequences, such as a 1) promoter and 2) a heterologous object sequence, and means, in such example, the promoter and heterologous object sequence (e.g., a gene of interest) are oriented such that, under suitable conditions, the promoter drives expression of the heterologous object sequence. For instance, the template nucleic acid may be single-stranded, e.g., either the (+) or (−) orientation but an operative association between promoter and heterologous object sequence means whether or not the template nucleic acid will transcribe in a particular state, when it is in the suitable state (e.g., is in the (+) orientation, in the presence of required catalytic factors, and NTPs, etc.), it does accurately transcribe. Operative association applies analogously to other pairs of nucleic acids, including other tissue-specific expression control sequences (such as enhancers, repressors and microRNA recognition sequences), IR/DR, ITRs, UTRs, or homology regions and heterologous object sequences or sequences encoding a transposase.

[0106] Pseudoknot: A “pseudoknot sequence” sequence, as used herein, refers to a nucleic acid (e.g., RNA) having a sequence with suitable self-complementarity to form a pseudoknot structure, e.g., having: a first segment, a second segment between the first segment and a third segment, wherein the third segment is complementary to the first segment, and a fourth segment, wherein the fourth segment is complementary to the second segment. The pseudoknot may optionally have additional secondary structure, e.g., a stem loop disposed in the second segment, a stem-loop disposed between the second segment and third segment, sequence before the first segment, or sequence after the fourth segment. The pseudoknot may have additional sequence between the first and second segments, between the second and third segments, or between the third and fourth segments. In some embodiments, the segments are arranged, from 5′ to 3′: first, second, third, and fourth. In some embodiments, the first and third segments comprise five base pairs of perfect complementarity. In some embodiments, the second and fourth segments comprise 10 base pairs, optionally with one or more (e.g., two) bulges. In some embodiments, the second segment comprises one or more unpaired nucleotides, e.g., forming a loop. In some embodiments, the third segment comprises one or more unpaired nucleotides, e.g., forming a loop.

[0107] Stem-loop sequence: As used herein, a “stem-loop sequence” refers to a nucleic acid sequence (e.g., RNA sequence) with sufficient self-complementarity to form a stem-loop, e.g., having a stem comprising at least two (e.g., 3, 4, 5, 6, 7, 8, 9, or 10) base pairs, and a loop with at least three (e.g., four) base pairs. The stem may comprise mismatches or bulges.

[0108] Tissue-specific expression-control sequence(s): As used herein, a “tissue-specific expression-control sequence” means nucleic acid elements that increase or decrease the level of a transcript comprising the heterologous object sequence in the target tissue in a tissue-specific manner, e.g., preferentially in an on-target tissue(s), relative to an off-target tissue(s). In some embodiments, a tissue-specific expression-control sequence preferentially drives or represses transcription, activity, or the half-life of a transcript comprising the heterologous object sequence in the target tissue in a tissue-specific manner, e.g., preferentially in an on-target tissue(s), relative to an off-target tissue(s). Exemplary tissue-specific expression-control sequences include tissue-specific promoters, repressors, enhancers, or combinations thereof, as well as tissue-specific microRNA recognition sequences. Tissue specificity refers to on-target (tissue(s) where expression or activity of the template nucleic acid is desired or tolerable) and off-target (tissue(s) where expression or activity of the template nucleic acid is not desired or is not tolerable). For example, a tissue-specific promoter (such as a promoter in a template nucleic acid or controlling expression of a transposase) drives expression preferentially in on-target tissues, relative to off-target tissues. In contrast, a micro-RNA that binds the tissue-specific microRNA recognition sequences (either on a nucleic acid encoding the transposase or on the template nucleic acid, or both) is preferentially expressed in off-target tissues, relative to on-target tissues, thereby reducing expression of a template nucleic acid (or transposase) in off-target tissues. Accordingly, a promoter and a microRNA recognition sequence that are specific for the same tissue, such as the target tissue, have contrasting functions (promote and repress, respectively, with concordant expression levels, i.e., high levels of the microRNA in off-target tissues and low levels in on-target tissues, while promoters drive high expression in on-target tissues and low expression in off-target tissues) with regard to the transcription, activity, or half-life of an associated sequence in that tissue.

### BRIEF DESCRIPTION OF THE DRAWINGS

[0109] FIGS. 1A and 1B. The linker region at the C-terminus of the DNA-binding domain of R2Tg can be truncated and modified. Deletions in the Natural Linker from the myb domain at A or B to positions 1 or 2 along with replacement by 3GS (SEQ ID NO: 1024) or XTEN synthetic linkers were constructed (FIG. 1A). Integration efficiency was measured in HEK293T cells by ddPCR (FIG. 1).

[0110] FIG. 2. Landing pads designed for testing target site mutations of R2Tg Gene Writer.

[0111] FIG. 3A. ddPCR assay measuring percentage of integrations from all lentiviral integrated landing pads per cell FIG. 3B. Amplicon-sequencing and NGS analysis of indels present at landing pads sites.

[0112] FIG. 4. AAVS1 ZFP replacement of DNA binding domain of a Retrotransposase Gene Writer. FIG. 4 discloses “3GS Linker” as SEQ ID NO: 1024.

[0113] FIG. 5. Cas9 or Cas9 nickase replacement of DNA binding domain of Retrotransposase GeneWriters with or without active EN domain (*=mutant) FIG. 6. AAVS1 ZFP fusion to a Retrotransposase Gene Writer with or without functional DNA binding domain.

[0114] FIGS. 7A and 7B. Schematic of second strand nicking. (FIG. 7A) A Cas9 nickase is fused to a Gene Writer protein. The Gene Writer protein introduces a nick in a DNA strand through its EN domain (shown as *), and the fused Cas9 nickase introduces a nicks on either top or bottom DNA strands (shown as X). (FIG. 7B) A Gene Writer is targeted to DNA through its DNA biding domain and introduces a DNA nick with its EN domain (*). A Cas9 nickase is then used the generate a second nick (X) at the top or bottom strand, upstream or downstream of the EN introduced nick.

[0115] FIGS. 8A and 8B. Schematic of nickaseCas9-GeneWriter fusions. (FIG. 8A) Schematic of nickaseCas9 fused to Gene Writer protein. (FIG. 8B) Schematic of 3′ extended gRNA.

[0116] FIGS. 9A and 9B. Schematic of nickaseCas9-GeneWriter fusions. (FIG. 9A) Schematic of nickaseCas9 fused to Gene Writer protein. (FIG. 9B) Schematic of donor transgene flanked by UTRs and homology to the cut site.

[0117] FIGS. 10A-10C. Schematic of constructs. (FIG. 10A) Schematic of Gene Writer protein. (FIG. 10B) Schematic of donor transgene flanked by UTRs and homology to the cut site. (FIG. 10C) Schematic of Cas9 constructs used.

[0118] FIGS. 11A and 11B. The schematics for mRNA encoding Gene Writer (FIG. 11A). The native untranslated regions (UTRs) were replaced by 5′ and 3′ UTRs optimized for the protein expression (shown as 5′ UTRexp and 3′ UTRexp). The Gene Writer protein expression was assayed by HiBit assay by probing HiBit tag expression (FIG. 11B). FIG. 11 discloses “3GS” as SEQ ID NO: 1024.

[0119] FIG. 12. Genome integration induced by Gene Writer protein with its native UTRs and UTRs optimized for the protein expression. The Gene Writing activity with non-native UTRs is stimulated by the presence of the RNA template bearing the retrotransposon native UTRs.

[0120] FIG. 13. Delivery of Gene Writer system using mRNA encoding the polypeptide and plasmid DNA encoding the RNA template for retrotransposition.

[0121] FIG. 14. Diagrams of example 5′UTR engineering strategies. HA=homology arm; K=Kozak sequence; pA=poly A signal; AMa=A. maritima; Rx=other species of retrotransposon.

[0122] FIG. 15. Possible location of an intron (or introns) within the RNA template. Introns are shown by curved lines. 5′HA: 5′ homology arm; 3′ HA: 3′ homology arm; 5′ UTR: Retrotransposon-specific 5′UTR; 3′ UTR: Retrotransposon-specific 3′ UTR; GOI: gene of interest. Orange blocks correspond to the sequence designed to be expressed from the genomic location harboring its own cell specific promoter, poly(A) signal and UTRs for the protein expression (5′ and 3′ UTRₑₓₚ). The sequence can be oriented in the sense (shown above) or the antisense orientation related to retrotransposon UTRs and homology arms. The intron can be located within GOI, or within UTRₑₓₚ.

[0123] FIG. 16. Genome integration in HEK293T cells as reported by 3′ ddPCR assay. The Gene Writer mRNA at 0.5 μg/well was co-transfected with the RNA templates with or without enzymatically added cap 1 and the poly(A) tail. The Gene Writer mRNA to RNA transgene ratio was 1:1.

[0124] FIG. 17. Genome integration detected by 3′ ddPCR induced by expression of Gene Writer mRNA produced with either unmodified (GO) or modified nucleotides (pseudouridine (Ψ), 1-N-methylpseudouridine (1-Me-Ψ), 5-methoxyuridine (5-MO-U) or 5-methylcytidine (5mC)). 1 ug of Gene Writer mRNA per well was used. The non-modified RNA template was used. The Gene Writer RNA to the RNA template were co-transfected in 1:8 molar ratio.

[0125] FIG. 18. The modules comprising a typical Gene Writer RNA template, where individual modules can be combined, re-arranged, and/or left out to produce a Gene Writer template. A=5′ homology arm; B=Ribozyme; C=5′ UTR; D=heterologous object sequence; E=3′ UTR; F=3′ homology arm.

[0126] FIG. 19. The modules comprising a typical Gene Writer RNA template, where individual modules can be combined, re-arranged, and/or left out to produce a Gene Writer template. A=5′ homology arm; B=Ribozyme; C=5′ UTR; D=heterologous object sequence; E=3′ UTR; F=3′ homology arm FIG. 20. Construct diagram of driver and transgene plasmids. Homology arms (HA) and stuffer sequences are variable in this set of experiments FIGS. 21A-21D. Integration efficiency at 3′ or 5′ end of transgene across constructs tested as measured via digital droplet PCR. Each point represents a replicate experiment. Bars represent mean of two replicate experiments. (FIGS. 21A-21B) Integration efficiency as measured across the 3′ junction between transgene and host rDNA. (FIGS. 21C-21D) Integration efficiency as measured across the 5′ junction.

[0127] FIG. 22. Example illustration of homology shift design tested for +/−3 bp. Red indicates homology to 5′ of the wildtype (WT) nick site, and blue indicates homology 3′ to the nick. 3′ shifted constructs (+) begin 3′ homology farther downstream from the nick. 5′ shifted constructs (−) incorporate homology from the 5′ of the nick into the 3′ homology arm.

[0128] FIG. 23. 3′ integration results from shifting the 3′ homology arm of the transgene. Each data point represents a replicate, while the bar represents the mean of two replicates.

[0129] FIGS. 24A-24C. (FIG. 24A) Timeline of experiment. (FIG. 24B) Schematic of R2Tg and transgene construct configurations. (FIG. 24C) Western Blot against Rad51 shows loss of Rad51 protein expression at day 3.

[0130] FIGS. 25A and 25B. U2OS cells were treated with a non targeting control siRNA (ctrl) or siRNA against Rad51, along with R2Tg Wt or control RT and EN mutants. ddPCR at the 3′ (FIG. 25A) or 5′ (FIG. 25B) junction was used to assess integration efficiency on day 3.

[0131] FIGS. 26A and 26B. (FIG. 26A) Sequence map of Ribozyme of R2 element from Taeniopygia guttata (R2Tg) in context of modules of Gene Writer transgene molecule RNA. The Ribozyme features are denoted as: P, based paired region; P′, based pair region complement strand; L, loop at end of P region; J, nucleotides joining base paired regions. This Figure discloses SEQ ID NO: 1592. (FIG. 26B) Prediction of ribozyme secondary structure of R2Tg. Shaded box indicates a predicted catalytic position that could be used to inactivate the ribozyme. This Figure discloses SEQ ID NO: 1592.

[0132] FIG. 27. Sequence map of Ribozyme of R2 element from Taeniopygia guttata (R2Tg) in context of modules of Gene Writer transgene molecule RNA. The Ribozyme features are denoted as: P, based paired region; P′, based pair region complement strand; L, loop at end of P region; J, nucleotides joining base paired regions. This Figure discloses SEQ ID NO: 1592.

[0133] FIG. 28. Prediction of ribozyme secondary structure of R2 element from Taeniopygia guttata. This Figure discloses SEQ ID NO: 1592.

[0134] FIGS. 29A and 29B are a series of diagrams showing examples of configurations of Gene Writers using domains derived from a variety of sources. Gene Writers as described herein may or may not comprise all domains depicted. For example, a GeneWriter may, in some instances, lack an RNA-binding domain, or may have single domains that fulfill the functions of multiple domains, e.g., a Cas9 domain for DNA binding and endonuclease activity. Exemplary domains that can be included in a GeneWriter polypeptide include DNA binding domains (e.g., comprising a DNA binding domain of an element of a sequence listed in any of Tables 1 or 3, or a domain listed in Table 2; a zinc finger; a TAL domain; Cas9; dCas9; nickase Cas9; a transcription factor, or a meganuclease), RNA binding domains (e.g., comprising an RNA binding domain of B-box protein, MS2 coat protein, dCas, or an element of a sequence listed in any of Tables 1 or 3, or a domain listed in Table 2), reverse transcriptase domains (e.g., comprising a reverse transcriptase domain of an element of a sequence listed in any of Tables 1 or 3, or a domain listed in Table 2), and/or an endonuclease domain (e.g., comprising an endonuclease domain of an element of a sequence listed in any of Tables 1 or 3, or a domain listed in Table 2; Cas9; nickase Cas9; a restriction enzyme (e.g., a type II restriction enzyme, e.g., FokI); a meganuclease; a Holliday junction resolvase; an RLE retrotranspase; an APE retrotransposase; or a GIY-YIG retrotransposase). Exemplary GeneWriter polypeptides comprising exemplary combinations of such domains are shown in the bottom panel.

[0135] FIGS. 30A and 30B illustrate mutations to the DNA binding motifs in a Gene Writer polypeptide that inhibit native site integration. FIG. 30A discloses a general domain structure of a R2Tg retrotransposase (top), comprising a DNA-binding domain containing multiple predicted DNA-binding elements (bottom). The two zinc finger motifs and c-myb motif indicated in the protein were mutated as according to Example 30. FIG. 30B illustrates that integration activity for the mutants of the ZF1, ZF2, and c-myb domains was assessed in HEK293T cells by analyzing native rDNA site integration frequency using ddPCR. Each individual mutant, as well as the triple mutant, was compared to wild-type (positive control) and an endonuclease-inactivated enzyme (negative control). Data indicate averages of two replicates. Figures legends: ZF=zinc finger; myb=c-myb-like DNA binding motif, RBD=RNA-binding domain; RT=reverse transcriptase domain; EN=endonuclease domain; *=mutated domain; CNV/Genome=average copies of integrated DNA per genome copy.

[0136] FIGS. 31A and 31B illustrate that the endonuclease cleavage site of a retrotransposase can be detected by indel signature. FIG. 31A shows the predicted binding and cleavage locations in the target site of the R2Tg retrotransposase. FIG. 31A discloses SEQ ID NO: 2022. FIG. 31B shows the cleavage site of the R2Tg retrotransposase was validated by analysis of genome alterations resulting from endonuclease activity. Plasmid DNA encoding the R2Tg retrotransposase was nucleofected into U2OS cells and genomic DNA was harvested after three days. Target site amplicons were generated using site-specific primers and sequenced to determine the location of genome alterations indicative of endonuclease activity. Shown here is a graph depicting the frequence of insertions (circles) and deletions (triangles) per nucleotide of sequence (x-axis). The peak of insertion signal (horizontal line under figure) was localized to the predicted GG dinucleotide. FIG. 31B discloses SEQ ID NO: 2023. Figure legend: ZF=zinc finger; myb=c-myb-like DNA binding motif

[0137] FIGS. 32A and 32B show determination of sequence determinants for endonuclease activity of a retrotransposase by schematic representation of Landing pad screen. FIG. 32A shows a lentiviral expression vector was used to clone landing pads containing a native R2 retrotransposase target site or sites comprising mutations relative to the native site. Lentiviral constructs were packaged and used to transduce U2OS cells for generating cell lines with the landing pads integrated into the genome. The landing pad additionally comprised a green fluorescent protein (GFP) reporter cassette for titer determinations. FIG. 32B shows Landing pad sequences comprising wild-type or mutational variants of the R2 site. A native rDNA sequence landing pad containing the unmodified rDNA sequence (WT_R2Tg) was used as a positive control. A series of 16 landing pads are shown with mutated regions indicated in dark gray and the GG cleavage site in light gray (left). The graph (right) was used to visualize the magnitude of each target site change on endonuclease activity of the enzyme. Mutation to the AA dinucleotide adjacent to the GG dinucleotide cleavage site was found to severely impair endonuclease activity, thus the motif AAGG is important for R2Tg endonuclease activity. FIG. 32B discloses SEQ ID NOS 2024-2040, and 2024, respectively, in order of appearance.

[0138] FIG. 33 shows the overview of landing pad screen for retargeting a Gene Writer polypeptide. Schematic of the landing pad library built to analyze the sequences recognized in R2Tg retargeting. The AAVS1-ZF binding site (dark gray and labeled AAVS1) was used as a DNA binding motif for retargeting, and all landing pads were built in the context of the human AAVS1 genomic sequence. rDNA sequence (black) was added to the AAVS1 sequence in various ways: (Category 1) different length of rDNA sequence, (Category 2) different distances between the AAVS1 ZF binding site and the rDNA sequence, (Category 3) different orientations of the rDNA sequence relative to the AAVS1 site. Categories 1, 2, and 3 were explored combinatorially, resulting in lading pads of various rDNA sequence lengths and various distances and orientations relative to the AAVS ZF binding site. The AAGG minimum sequence for R2Tg cleavage was maintained in all landing pads (black box with white fill). Each landing pad was designed with a unique barcode at the 3′ end of the sequence to enable computational extraction and analysis of landing pad sequences from the pool.

[0139] FIG. 34 represents sequencing-based determination of landing pad representation in U2OS pool. The landing pad pool of U2OS cells was sequenced and analyzed to determine barcode representation. Approximately 94% of landing pads were represented by at least 10,000 reads (horizontal black bar). The x-axis indicates landing pad identity and the y-axis shows the total reads for that barcode.

[0140] FIGS. 35A and 35B disclose generation of indel signatures in a landing pad library enables screening of chimeric Gene Writer polypeptides. FIG. 35A shows a landing pad library comprising various compositions of AAVS1 and R2 rDNA target sequences was treated with a full-length R2Tg retrotransposase fused to a zinc finger for AAVS1 sequence recognition. Amplicon sequencing was performed and insertion frequencies at the GG target site (y-axis) are plotted for each landing pad (x-axis). A representative number of 230 landing pads is shown on the x-axis. Positive controls containing 200 nt of rDNA sequence are indicated and showed the expected insertion signatures at the GG cleavage site. The negative control lacking any rDNA sequence did not harbor any insertions. The lengths of the rDNA sequence comprised in landing pads where insertion signatures were found indicated and corresponded to 44, 64, and 84 nt. FIG. 35B is an illustrative representation of landing pad configurations found to contain signatures of endonuclease activity.

[0141] FIGS. 36A and 36B disclose generation of indel signatures in a landing pad library enables screening of chimeric Gene Writer polypeptides. FIG. 36A shows a landing pad library comprising various compositions of AAVS1 and R2 rDNA target sequences was treated with a full-length R2Tg retrotransposase fused to a zinc finger for AAVS1 sequence recognition. Amplicon sequencing was performed and insertion frequencies at the GG target site (y-axis) are plotted for each landing pad (x-axis). A representative number of 230 landing pads is shown on the x-axis. The negative control lacking any rDNA sequence did not harbor any insertions. The lengths of the rDNA sequence comprised in landing pads where insertion signatures were found indicated and corresponded to 44, 64, and 84 nt. FIG. 36B is an illustrative representation of landing pad configurations found to contain signatures of endonuclease activity.

[0142] FIGS. 37A and 37B describe luciferase activity assay for primary cells. LNPs formulated as according to Example 38 were analyzed for delivery of cargo to primary human (FIG. 37A) and mouse (FIG. 37B) hepatocytes, as according to Example 39. The luciferase assay revealed dose-responsive luciferase activity from cell lysates, indicating successful delivery of RNA to the cells and expression of Firefly luciferase from the mRNA cargo.

[0143] FIG. 38 shows LNP-mediated delivery of RNA cargo to the murine liver. Firefly luciferase mRNA-containing LNPs were formulated and delivered to mice by iv, and liver samples were harvested and assayed for luciferase activity at 6, 24, and 48 hours post administration. Reporter activity by the various formulations followed the ranking LIPIDV005>LIPIDV004>LIPIDV003. RNA expression was transient and enzyme levels returned near vehicle background by 48 hours, post-administration.

[0144] FIG. 39. Shows improving expression of Cas-RT fusions through choice of linker sequence. To assess how linkers can alter the expression of novel Gene Writer polypeptides in human cells, U2OS cells were transfected with Cas-RT expression plasmids harboring various linkers from Table 42 fusing the Cas9(N863A) nickase to the RT domain of an RNA-binding domain mutated R2Bm retrotransposase. Cell lysates were collected and analyzed by Western blot using a primary antibody against Cas9. A primary antibody against vinculin (left) or GADPH (right) was included as a loading control. Cas9 controls on the left represent titration of a Cas9 expression plasmid. Empty arrows indicate the original linker tested, while the filled arrow represents a linker (Linker 10; SEQ ID NO: 468)) found to substantially improve expression of the fusion polypeptide. Sample numbers correspond to linker sequence identifiers in Table 42.

### DETAILED DESCRIPTION

[0145] This disclosure relates to compositions, systems and methods for targeting, editing, modifying or manipulating a DNA sequence (e.g., inserting a heterologous object DNA sequence into a target site of a mammalian genome) at one or more locations in a DNA sequence in a cell, tissue or subject, e.g., in vivo or in vitro. The object DNA sequence may include, e.g., a coding sequence, a regulatory sequence, a gene expression unit.

[0146] More specifically, the disclosure provides retrotransposon-based systems for inserting a sequence of interest into the genome. This disclosure is based, in part, on a bioinformatic analysis to identify retrotransposase sequences and the associated 5′ UTR and 3′ UTR from a variety of organisms (see Table 3).

### Gene-Writer™ Genome Editors

[0147] Non-long terminal repeat (LTR) retrotransposons are a type of mobile genetic elements that are widespread in eukaryotic genomes. They include two classes: the apurinic/apyrimidinic endonuclease (APE)-type and the restriction enzyme-like endonuclease (RLE)-type. The APE class retrotransposons are comprised of two functional domains: an endonuclease/DNA binding domain, and a reverse transcriptase domain. The RLE class are comprised of three functional domains: a DNA binding domain, a reverse transcription domain, and an endonuclease domain. The reverse transcriptase domain of non-LTR retrotransposon functions by binding an RNA sequence template and reverse transcribing it into the host genome's target DNA. The RNA sequence template has a 3′ untranslated region which is specifically bound to the transposase, and a variable 5′ region generally having Open Reading Frame(s) (“ORF”) encoding transposase proteins. The RNA sequence template may also comprise a 5′ untranslated region which specifically binds the retrotransposase.

[0148] Reverse transcription by non-LTR retrotransposons occurs via a unique process described as target-primed reverse transcription (Luan et al. Cell 72, 595-605 (1993)). To initiate the integration, a first single-stranded nick is generated by an endonuclease domain of the retrotransposase, releasing a free 3′-OH. The retrotransposon RNA, bound by the retrotransposase using structural features at the 3′ end, is then primed by the target site with polymerization at the free 3′-OH and used as a template for reverse transcription. In some systems, a second nick is targeted to the second DNA strand and the new free 3′-OH is used to initiate second strand synthesis. Some non-LTR retrotransposons, e.g., R2, are believed to additionally require interaction with a second retrotransposase unit at the 5′ end of the retrotransposon RNA for this second nick, which is activated upon the release of the 5′ end (Craig, Mobile DNA III, ASM, ed. 3 (2105)).

[0149] As described herein, the elements of such non-LTR retrotransposons can be functionally modularized and/or modified to target, edit, modify or manipulate a target DNA sequence, e.g., to insert an object (e.g., heterologous) nucleic acid sequence into a target genome, e.g., a mammalian genome, by reverse transcription. Such modularized and modified nucleic acids, polypeptide compositions and systems are described herein and are referred to as Gene Writer™ gene editors. A Gene Writer™ gene editor system comprises: (A) a polypeptide or a nucleic acid encoding a polypeptide, wherein the polypeptide comprises (i) a reverse transcriptase domain, and either (x) an endonuclease domain that contains DNA binding functionality or (y) an endonuclease domain and separate DNA binding domain; and (B) a template RNA comprising (i) a sequence that binds the polypeptide and (ii) a heterologous insert sequence. For example, the Gene Writer genome editor protein may comprise a DNA-binding domain, a reverse transcriptase domain, and an endonuclease domain. In other embodiments, the Gene Writer genome editor protein may comprise a reverse transcriptase domain and an endonuclease domain. In certain embodiments, the elements of the Gene Writer™ gene editor polypeptide can be derived from sequences of non-LTR retrotransposons, e.g., APE-type or RLE-type retrotransposons or portions or domains thereof. In some embodiments the RLE-type non-LTR retrotransposon is from the R2, NeSL, HERO, R4, or CRE clade. In some embodiments the Gene Writer genome editor is derived from R4 element X4_Line, which is found in the human genome. In some embodiments the APE-type non-LTR retrotransposon is from the R1, or Tx1 clade. In some embodiments the Gene Writer genome editor is derived from Tx1 element Mare6, which is found in the human genome. The RNA template element of a Gene Writer™ gene editor system is typically heterologous to the polypeptide element and provides an object sequence to be inserted (reverse transcribed) into the host genome. In some embodiments the Gene Writer genome editor protein is capable of target primed reverse transcription. In some embodiments, the Gene Writer genome editor protein is capable of second strand synthesis.

[0150] In some embodiments the Gene Writer genome editor is combined with a second polypeptide. In some embodiments the second polypeptide is derived from an APE-type non-LTR retrotransposon. In some embodiments the second polypeptide has a zinc knuckle-like motif. In some embodiments the second polypeptide is a homolog of Gag proteins. In some embodiments, the second polypeptide possesses specific binding activity for the RNA template. In some embodiments, the second polypeptide aids in localization of the RNA template to the nucleus.

[0151] In embodiments, the disclosure provides a nucleic acid molecule or a system for retargeting, e.g., of a Gene Writer polypeptide or nucleic acid molecule, or of a system as described herein. Retargeting (e.g., of a Gene Writer polypeptide or nucleic acid molecule, or of a system as described herein) generally comprises. (i) directing the polypeptide to bind and cleave at the target site; and/or (ii) designing the template RNA to have complementarity to the target sequence. In some embodiments, the template RNA has complementarity to the target sequence 5′ of the first-strand nick, e.g., such that the 3′ end of the template RNA anneals and the 5′ end of the target site serves as the primer, e.g., for target-primed reverse transcription (TPRT). In some embodiments, the endonuclease domain of the polypeptide and the 5′ end of the RNA template are also modified as described.

### Polypeptide Component of Gene Writer Gene Editor System

[0152] Rt Domain:

[0153] In certain aspects of the present invention, the reverse transcriptase domain of the Gene Writer system is based on a reverse transcriptase domain of an APE-type or RLE-type non-LTR retrotransposon. A wild-type reverse transcriptase domain of an APE-type or RLE-type non-LTR retrotransposon can be used in a Gene Writer system or can be modified (e.g., by insertion, deletion, or substitution of one or more residues) to alter the reverse transcriptase activity for target DNA sequences. In some embodiments the reverse transcriptase is altered from its natural sequence to have altered codon usage, e.g. improved for human cells. In some embodiments the reverse transcriptase domain is a heterologous reverse transcriptase from a different retrovirus, LTR-retrotransposon, or non-LTR retrotransposon. In certain embodiments, a Gene Writer system includes a polypeptide that comprises a reverse transcriptase domain of an RLE-type non-LTR retrotransposon from the R2, NeSL, HERO, R4, or CRE clade, or of an APE-type non-LTR retrotransposon from the R1, or Tx1 clade. In certain embodiments, a Gene Writer™ system includes a polypeptide that comprises a reverse transcriptase domain of a non-LTR retrotransposon, LTR retrotransposon, group II intron, diversity-generating element, retron, telomerase, retroplasmid, retrovirus, or an engineered polymerase listed in Table 1 or Table 3. In some embodiments, a Gene Writer™ system includes a polypeptide that comprises a reverse transcriptase domain listed in Table 2. In embodiments, the amino acid sequence of the reverse transcriptase domain of a Gene Writer system is at least about 50%, at least about 60%, at least about 70%, at least about 80%, at least about 85%, at least about 90%, at least about 95%, at least about 96%, at least about 97%, at least about 98%, at least about 99% identical to the amino acid sequence of a reverse transcriptase domain of a non-LTR retrotransposon, LTR retrotransposon, group II intron, diversity-generating element, retron, telomerase, retroplasmid, retrovirus, or an engineered polymerase whose sequence is referenced in Table 1 or Table 3, or to a peptide comprising a reverse transcriptase domain listed in Table 2. In some embodiments, the RT domain has a sequence selected from Table 1 or 3, or a sequence of a peptide comprising an RT domain selected from Table 2, or a sequence having at least 70%, 75%, 80%, 85%, 90%, 95%, 96%, 97%, 98%, or 99% identity thereto. In some embodiments, the RT domain is derived from the RT of a retrovirus, e.g., HIV-1 RT, Moloney Murine Leukemia Virus (MMLV) RT, avian myeloblastosis virus (AMV) RT, Rous Sarcoma Virus (RSV) RT. In some embodiments, the RT domain is derived from the RT of a Group II intron, e.g., the group II intron maturase RT from Eubacterium rectale (MarathonRT) (Zhao et al. RNA 24:2 2018), the RT domain from LtrA, the RT TGIRT (or trt). In some embodiments, the RT domain is derived from the RT of a retron, e.g., the reverse transcriptase from Ec86 (RT86). In some embodiments, the RT domain is derived from a diversity-generating retroelement, e.g., from the RT of Brt. In some embodiments, the RT domain is derived from the RT of a retroplasmid, e.g., the RT from the Mauriceville plasmid. In some embodiments, the RT domain is derived from a non-LTR retrotransposon, e.g., the RT from R2Bm, the RT from R2Tg, the RT from LINE-1, the RT from Penelope or a Penelope-like element (PLE). In some embodiments, the RT domain is derived from an LTR retrotransposon, e.g., the reverse transcriptase from Tyl. In some embodiments, the RT domain is derived from a telomerase, e.g., TERT. A person having ordinary skill in the art is capable of identifying reverse transcription domains based upon homology to other known reverse transcription domains using routine tools as Basic Local Alignment Search Tool (BLAST). In some embodiments, the reverse transcriptase contains the InterPro domain IPR000477. In some embodiments, the reverse transcriptase contains the pfam domain PF00078. In some embodiments, the reverse transcriptase contains the InterPro domain IPR013103. In some embodiments, the RT contains the pfam domain PF07727. In some embodiments, the reverse transcriptase contains a conserved protein domain of the cd00304 RT_like family, e.g., cd01644 (RT_pepA17), cd01645 (RT_Rtv), cd01646 (RT_Bac_retron_I), cd01647 (RT_LTR), cd01648 (TERT), cd01650 (RT_nLTR_like), cd01651 (RT_G2_intron), cd01699 (RNA_dep_RNAP), cd01709 (RT_like_1), cd03487 (RT_Bac_retron_II), cd03714 (RT_DIRS1), cd03715 (RT_ZFREV_like). Proteins containing these domains can additionally be found by searching the domains on protein databases, such as InterPro (Mitchell et al. Nucleic Acids Res 47, D351-360 (2019)), UniProt (The UniProt Consortium Nucleic Acids Res 47, D506-515 (2019)), or the conserved domain database (Lu et al. Nucleic Acids Res 48, D265-268 (2020)), or by scanning open reading frames for reverse transcriptase domains using prediction tools, for example InterProScan. The diversity of reverse transcriptases (e.g., comprising RT domains) has been described in, but not limited to, those used by prokaryotes (Zimmerly et al. Microbiol Spectr 3(2):MDNA3-0058-2014 (2015); Lampson B. C. (2007) Prokaryotic Reverse Transcriptases. In: Polaina J., MacCabe A. P. (eds) Industrial Enzymes. Springer, Dordrecht), viruses (Herschhorn et al. CellMolLife Sci 67(16):2717-2747 (2010); Menéndez-Arias et al. Virus Res 234:153-176 (2017)), and mobile elements (Eickbush et al. Virus Res 134(1-2):221-234 (2008); Craig et al. Mobile DNA III 3rd Ed. DOI:10.1128/9781555819217 (2015)), each of which is incorporated herein by reference.

[0154] In some embodiments, the RT domain exhibits enhanced stringency of target-primed reverse transcription (TPRT) initiation, e.g., relative to an endogenous RT domain. In some embodiments, the RT domain initiates TPRT when the 3 nt in the target site immediately upstream of the first strand nick, e.g., the genomic DNA priming the RNA template, have at least 66% or 100% complementarity to the 3 nt of homology in the RNA template. In some embodiments, the RT domain initiates TPRT when there are less than 5 nt mismatched (e.g., less than 1, 2, 3, 4, or 5 nt mismatched) between the template RNA homology and the target DNA priming reverse transcription. In some embodiments, the RT domain is modified such that the stringency for mismatches in priming the TPRT reaction is increased, e.g., wherein the RT domain does not tolerate any mismatches or tolerates fewer mismatches in the priming region relative to a wild-type (e.g., unmodified) RT domain. In some embodiments, the RT domain comprises a HIV-1 RT domain. In embodiments, the HIV-1 RT domain initiates lower levels of synthesis even with three nucleotide mismatches relative to an alternative RT domain (e.g., as described by Jamburuthugoda and Eickbush J Mol Biol 407(5):661-672 (2011); incorporated herein by reference in its entirety).

[0155] In some embodiments, the RT domain forms a dimer (e.g., a heterodimer or homodimer). In some embodiments, the RT domain is monomeric. In some embodiments, an RT domain, e.g., a retroviral RT domain, naturally functions as a monomer or as a dimer (e.g., heterodimer or homodimer). In some embodiments, an RT domain naturally functions as a monomer, e.g., is derived from a virus wherein it functions as a monomer. Exemplary monomeric RT domains, their viral sources, and the RT signatures associated with them can be found in Table 30 with descriptions of domain signatures in Table 32. In some embodiments, the RT domain of a system described herein comprises an amino acid sequence of Table 30, or a functional fragment or variant thereof, or a sequence having at least 70%, 80%, 90%, 95%, or 99% identity thereto. In embodiments, the RT domain is selected from an RT domain from murine leukemia virus (MLV; sometimes referred to as MoMLV) (e.g., P03355), porcine endogenous retrovirus (PERV) (e.g., UniProt Q4VFZ2), mouse mammary tumor virus (MMTV) (e.g., UniProt P03365), Mason-Pfizer monkey virus (MPMV) (e.g., UniProt P07572), bovine leukemia virus (BLV) (e.g., UniProt P03361), human T-cell leukemia virus-1 (HTLV-1) (e.g., UniProt P03362), human foamy virus (HFV) (e.g., UniProt P14350), simian foamy virus (SFV) (e.g., UniProt P23074), or bovine foamy/syncytial virus (BFV/BSV) (e.g., UniProt 041894), or a functional fragment or variant thereof (e.g., an amino acid sequence having at least 70%, 80%, 90%, 95%, or 99% identity thereto). In some embodiments, an RT domain is dimeric in its natural functioning. Exemplary dimeric RT domains, their viral sources, and the RT signatures associated with them can be found in Table 31 with descriptions of domain signatures in Table 32. In some embodiments, the RT domain of a system described herein comprises an amino acid sequence of Table 31, or a functional fragment or variant thereof, or a sequence having at least 70%, 80%, 90%, 95%, or 99% identity thereto. In some embodiments, the RT domain is derived from a virus wherein it functions as a dimer. In embodiments, the RT domain is selected from an RT domain from avian sarcoma/leukemia virus (ASLV) (e.g., UniProt AOA142BKH1), Rous sarcoma virus (RSV) (e.g., UniProt P03354), avian myeloblastosis virus (AMV) (e.g., UniProt Q83133), human immunodeficiency virus type I (HIV-1) (e.g., UniProt P03369), human immunodeficiency virus type II (HIV-2) (e.g., UniProt P15833), simian immunodeficiency virus (SIV) (e.g., UniProt P05896), bovine immunodeficiency virus (BIV) (e.g., UniProt P19560), equine infectious anemia virus (EIAV) (e.g., UniProt P03371), or feline immunodeficiency virus (FIV) (e.g., UniProt P16088) (Herschhorn and Hizi Cell Mol Life Sci 67(16):2717-2747 (2010)), or a functional fragment or variant thereof (e.g., an amino acid sequence having at least 70%, 80%, 90%, 95%, or 99% identity thereto). Naturally heterodimeric RT domains may, in some embodiments, also be functional as homodimers. In some embodiments, dimeric RT domains are expressed as fusion proteins, e.g., as homodimeric fusion proteins or heterodimeric fusion proteins. In some embodiments, the RT function of the system is fulfilled by multiple RT domains (e.g., as described herein). In further embodiments, the multiple RT domains are fused or separate, e.g., may be on the same polypeptide or on different polypeptides.

[0156] In some embodiment, a GeneWriter described herein comprises an integrase domain, e.g., wherein the integrase domain may be part of the RT domain. In some embodiments, an RT domain (e.g., as described herein) comprises an integrase domain. In some embodiments, an RT domain (e.g., as described herein) lacks an integrase domain, or comprises an integrase domain that has been inactivated by mutation or deleted. In some embodiment, a GeneWriter described herein comprises an RNase H domain, e.g., wherein the RNase H domain may be part of the RT domain. In some embodiments, an RT domain (e.g., as described herein) comprises an RNase H domain, e.g., an endogenous RNAse H domain or a heterologous RNase H domain. In some embodiments, an RT domain (e.g., as described herein) lacks an RNase H domain. In some embodiments, an RT domain (e.g., as described herein) comprises an RNase H domain that has been added, deleted, mutated, or swapped for a heterologous RNase H domain. In some embodiments, mutation of an RNase H domain yields a polypeptide exhibiting lower RNase activity, e.g., as determined by the methods described in Kotewicz et al. Nucleic Acids Res 16(1):265-277 (1988) (incorporated herein by reference in its entirety), e.g., lower by at least 10%, 20%, 30%, 40%, 50%, 60%, 70%, 80%, or 90% compared to an otherwise similar domain without the mutation. In some embodiments, RNase H activity is abolished.

[0157] In some embodiments, an RT domain is mutated to increase fidelity compared to to an otherwise similar domain without the mutation. For instance, in some embodiments, a YADD (SEQ ID NO: 1547) or YMDD (SEQ ID NO: 1548) motif in an RT domain (e.g., in a reverse transcriptase) is replaced with YVDD (SEQ ID NO: 1549). In embodiments, replacement of the YADD (SEQ ID NO: 1547) or YMDD (SEQ ID NO: 1548) or YVDD (SEQ ID NO: 1549) results in higher fidelity in retroviral reverse transcriptase activity (e.g., as described in Jamburuthugoda and Eickbush J Mol Biol 2011; incorporated herein by reference in its entirety).

[0158] In some embodiments, reverse transcriptase domains are modified, for example by site-specific mutation. In some embodiments, reverse transcriptase domains comprise a number of amino acid substitutions relative to the natural sequence, e.g., at least 1, 2, 3, 4, 5, 10, 20, 30, 40, 50, 60, 70, 80, 90, or 100 substitutions. In embodiments, the reverse transcriptase domain is engineered to bind a heterologous template RNA.

TABLE 1
Exemplary reverse transcriptase domains from different types of sources.
Sources include Group II intron, non-LTR retrotransposon, retrovirus, LTR
retrotransposon, diversity-generating retroelement, retron, telomerase,
retroplasmid, and evolved DNA polymerase. Also included are the associated
RT signatures from the InterPro, pfam, and cd databases. Although the evolved
polymerase RTX can perform RNA-dependent DNA polymerization, no RT signatures
were identified by InterProScan, so polymerase signatures are included instead.

| | | | | | RT |
|---|---|---|---|---|---|
| Protein | Type | Accession | UniProt | Sequence | signatures |
| Marathon | Group II | CBK92290.1 | D4JMT6 | MDTSNLMEQILSSDNLNRAY | IPR000477, |
| RT | intron | | | LQVVRNKGAEGVDGMKYTEL | PF00078, |
| | | | | KEHLAKNGETIKGQLRTRKY | cd01651 |
| | | | | KPQPARRVEIPKPDGGVRNL | |
| | | | | GVPTVTDRFIQQAIAQVLTP | |
| | | | | IYEEQFHDHSYGFRPNRCAQ | |
| | | | | QAILTALNIMNDGNDWIVDI | |
| | | | | DLEKFFDTVNHDKLMTLIGR | |
| | | | | TIKDGDVISIVRKYLVSGIM | |
| | | | | IDDEYEDSIVGTPQGGNLSP | |
| | | | | LLANIMLNELDKEMEKRGLN | |
| | | | | FVRYADDCIIMVGSEMSANR | |
| | | | | VMRNISRFIEEKLGLKVNMT | |
| | | | | KSKVDRPSGLKYLGFGFYFD | |
| | | | | PRAHQFKAKPHAKSVAKFKK | |
| | | | | RMKELTCRSWGVSNSYKVEK | |
| | | | | LNQLIRGWINYFKIGSMKTL | |
| | | | | CKELDSRIRYRLRMCIWKQW | |
| | | | | KTPQNQEKNLVKLGIDRNTA | |
| | | | | RRVAYTGKRIAYVCNKGAVN | |
| | | | | VAISNKRLASFGLISMLDYY | |
| | | | | IEKCVTC | |
| | | | | (SEQ ID NO: 1550) | |
| TGIRT, | Group II | AAT72329.1 | Q6DKY2 | MALLERILADRNLITALKRV | IPR000477, |
| trt | intron | | | EANQGAPGIGDVSTDQLRDI | PF00078, |
| | | | | YRAHWSTIRAQLLAGTYRPA | cd01651 |
| | | | | PVRRVGIPKGPGGTRQLGIT | |
| | | | | PVVDRLIQQIALQELTPIFD | |
| | | | | PDFSPSSFGFRPGRNAHDAV | |
| | | | | RQAQGYIQEYGRYVVDMDLK | |
| | | | | EFFDRVNHDLIMSRVARKVD | |
| | | | | KKRVLKLIRYALQAGVMIEG | |
| | | | | VKVQTEEGTQPGGPLSPLLA | |
| | | | | NILLDDLDKELEKRGLKFCY | |
| | | | | RADDCNI | |
| | | | | YVSKLRAGQRVKQSIQRFLE | |
| | | | | KTLKLKVNEEKSVADRPWKR | |
| | | | | AFGLFSFTPERKARIRLAPR | |
| | | | | SIQRLKQRIRQLTNPNWSIS | |
| | | | | MPREIHRVNQYVGMWIGYFR | |
| | | | | LVTEPSVLQTIEGWIRRRLR | |
| | | | | LCWQLQWKRVRTRIRELRAL | |
| | | | | GLKETAVMEIANRTKGAWRT | |
| | | | | TKPQTLHQALGKYTWTAQGL | |
| | | | | KTSLQRYFELRQG | |
| | | | | (SEQ ID NO: 1551) | |
| LtrA | Group II | AAB06503.1 | P0A3U0 | MKPTMAILERISKNSQENID | IPR000477, |
| | intron | | | EVFTRLYRYLLRPDIYYVAY | PF00078, |
| | | | | QNLYSNKGASTKGILDDTAD | cd01651 |
| | | | | GFSEEKIKKIIQSLKDGTYY | |
| | | | | PQPVRRMYIAKKNSKKMRPL | |
| | | | | GIPTFTDKLIQEAVRIILES | |
| | | | | IYEPVFEDVSHGFRPQRSCH | |
| | | | | TALKTIKREFGGARWFVEGD | |
| | | | | IKGCFDNIDHVTLIGLINLK | |
| | | | | IKDMKMSQLIYKFLKAGYLE | |
| | | | | NWQYHKTYSGTPQGGILSPL | |
| | | | | LANIYLHELDKFVLQLKMKF | |
| | | | | DRESPERITPEYRELHNEIK | |
| | | | | RISHRLKKLEGEEKAKVLLE | |
| | | | | YQEKRKRLPTLPCTSQTNKV | |
| | | | | LKYVRYADDFIISVKGSKED | |
| | | | | CQWIKEQLKLFIHNKLKMEL | |
| | | | | SEEKTLITHSSQPARFLGYD | |
| | | | | IRVRRSGTIKRSGKVKKRTL | |
| | | | | NGSVELLIPLQDKIRQFIFD | |
| | | | | KKIAIQKKDSSWFPVHRKYL | |
| | | | | IRSTDLEIITIYNSELRGIC | |
| | | | | NYYGLASNFNQLNYFAYLME | |
| | | | | YSCLKTIASKHKGTLSKTIS | |
| | | | | MFKDGSGSWGIPYEIKQGKQ | |
| | | | | RRYFANFSECKSPYQFTDEI | |
| | | | | SQAPVLYGYARNTLENRLKA | |
| | | | | KCCELCGTSDENTSYEIHHV | |
| | | | | NKVKNLKGKEKWEMAMIAKQ | |
| | | | | RKTLVVCFHCHRHVIHKHK | |
| | | | | (SEQ ID NO: 1552) | |
| R2Bm | non-LTR | AAB59214.1 | V9H052 | MMASTALSLMGRCNPDGCTR | IPR000477, |
| | retrotransposon | | | GKHVTAAPMDGPRGPSSLAG | PF00078, |
| | | | | TFGWGLAIPAGEPCGRVCSP | cd01650 |
| | | | | ATVGFFPVAKKSNKENRPEA | |
| | | | | SGLPLESERTGDNPTVRGSA | |
| | | | | GADPVGQDAPGWTCQFCERT | |
| | | | | FSTNRGLGVHKRRAHPVETN | |
| | | | | TDAAPMMVKRRWHGEEIDLL | |
| | | | | ARTEARLLAERGQCSGGDLF | |
| | | | | GALPGFGRTLEAIKGQRRRE | |
| | | | | PYRALVQAHLARFGSQPGPS | |
| | | | | SGGCSAEPDFRRASGAEEAG | |
| | | | | EERCAEDAAAYDPSAVGQMS | |
| | | | | PDAARVLSELLEGAGRRRAC | |
| | | | | RAMRPKTAGRRNDLHDDRTA | |
| | | | | SAHKTSRQKRRAEYARVQEL | |
| | | | | YKKCRSRAAAEVIDGACGGV | |
| | | | | GHSLEEMETYWRPILERVSD | |
| | | | | APGPTPEALHALGRAEWHGG | |
| | | | | NRDYTQLWKPISVEEIKASR | |
| | | | | FDWRTSPGPDGIRSGQWRAV | |
| | | | | PVHLKAEMFNAWMARGEIPE | |
| | | | | ILRQCRTVFVPKVERPGGPG | |
| | | | | EYRPISIASIPLRHFHSILA | |
| | | | | RRLLACCPPDARQRGFICAD | |
| | | | | GTLENSAVLDAVLGDSRKKL | |
| | | | | RECHVAVLDFAKAFDTVSHE | |
| | | | | ALVELLRLRGMPEQFCGYIA | |
| | | | | HLYDTASTTLAVNNEMSSPV | |
| | | | | KVGRGVRQGDPLSPILFNVV | |
| | | | | MDLILASLPERVGYRLEMEL | |
| | | | | VSALAYADDLVLLAGSKVGM | |
| | | | | QESISAVDCVGRQMGLRLNC | |
| | | | | RKSAVLSMIPDGHRKKHHYL | |
| | | | | TERTFNIGGKPLRQVSCVER | |
| | | | | WRYLGVDFEASGCVTLEHSI | |
| | | | | SSALNNISRAPLKPQQRLEI | |
| | | | | LRAHLIPRFQHGFVLGNISD | |
| | | | | DRLRMLDVQIRKAVGQWLRL | |
| | | | | PADVPKAYYHAAVQDGGLAI | |
| | | | | PSVRATIPDLIVRRFGGLDS | |
| | | | | SPWSVARAAAKSDKIRKKLR | |
| | | | | WAWKQLRRFSRVDSTTQRPS | |
| | | | | VRLFWREHLHASVDGRELRE | |
| | | | | STRTPTSTKWIRERCAQITG | |
| | | | | RDFVQFVHTHINALPSRIRG | |
| | | | | SRGRRGGGESSLTCRAGCKV | |
| | | | | RETTAHILQQCHRTHGGRIL | |
| | | | | RHNKIVSFVAKAMEENKWTV | |
| | | | | ELEPRLRTSVGLRKPDIIAS | |
| | | | | RDGVGVIVDVQVVSGQRSLD | |
| | | | | ELHREKRNKYGNHGELVELV | |
| | | | | AGRLGLPKAECVRATSCTIS | |
| | | | | WRGVWSLTSYKELRSIIGLR | |
| | | | | EPTLQIVPILALRGSHMNWT | |
| | | | | RFNQMTSVMGGGVG | |
| | | | | (SEQ ID NO: 1553) | |
| LINE-1 | non-LTR | AAC51271.1 | 000370 | MTGSNSHITILTLNVNGLNS | IPR000477, |
| | retrotransposon | | | PIKRHRLASWIKSQDPSVCC | PF00078, |
| | | | | IQETHLTCRDTHRLKIKGWR | cd01650 |
| | | | | KIYQANGKQKKAGVAILVSD | |
| | | | | KTDFKPTKIKRD | |
| | | | | KEGHYIMVKGSIQQEELTIL | |
| | | | | NIYAPNTGAPRFIKQVLSDL | |
| | | | | QRDLDSHTLIMGDFNTPLSI | |
| | | | | LDRSTRQKVNKDTQELNSAL | |
| | | | | HQTDLIDIYRTLHPKSTEYT | |
| | | | | FFSAPHHTYSKIDHIVGSKA | |
| | | | | LLSKCKRTEIITNYLSDHSA | |
| | | | | IKLELRIKNLTQSRSTTWKL | |
| | | | | NNLLLNDYWVHNEMKAEIKM | |
| | | | | FFETNENKDTTYQNLWDAFK | |
| | | | | AVCRGKFIALNAYKRKQERS | |
| | | | | KIDTLTSQLKELEKQEQTHS | |
| | | | | KASRRQEITKIRAELKEIET | |
| | | | | QKTLQKINESRSWFFERINK | |
| | | | | IDRPLARLIKKKREKNQIDT | |
| | | | | IKNDKGDITTDPTEIQTTIR | |
| | | | | EYYKHLYANKLENLEEMDTF | |
| | | | | LDTYTLPRLNQEEVESLNRP | |
| | | | | ITGSEIVAIINSLPTKKSPG | |
| | | | | PDGFTAEFYQRYKEELVPFL | |
| | | | | LKLFQSIEKEGILPNSFYEA | |
| | | | | SIILIPKPGRDTTKKENFRP | |
| | | | | ISLMNIDAKILNKILANRIQ | |
| | | | | QHIKKLIHHDQVGFIPGMQG | |
| | | | | WFNIRKSINVIQHINRAKDK | |
| | | | | NHVIISIDAEKAFDKIQQPF | |
| | | | | MLKTLNKLGIDGMYLKIIRA | |
| | | | | IYDKPTANIILNGQKLEAFP | |
| | | | | LKTGTRQGCPLSPLLFNIVL | |
| | | | | EVLARAIRQEKEIKGIQLGK | |
| | | | | EEVKLSLFADDMIVYLENPI | |
| | | | | VSAQNLLKLISNFSKVSGYK | |
| | | | | INVQKSQAFLYNNNRQTESQ | |
| | | | | IMGELPFTIASKRIKYLGIQ | |
| | | | | LTRDVKDLFKENYKPLLKEI | |
| | | | | KEDTNKWKNIPCSWVGRINI | |
| | | | | VKMAILPKVIYRFNAIPIKL | |
| | | | | PMTFFTELEKTTLKFIWNQK | |
| | | | | RARIAKSILSQKNKAGGITL | |
| | | | | PDFKLYYKATVTKTAWYWYQ | |
| | | | | NRDIDQWNRTEPSEIMPHIY | |
| | | | | NYLIFDKPEKNKQWGKDSLL | |
| | | | | NKWCWENWLAICRKLKLDPF | |
| | | | | LTPYTKINSRWIKDLNVKPK | |
| | | | | TIKTLEENLGITIQDIGVGK | |
| | | | | DFMSKTPKAMATKDKIDKWD | |
| | | | | LIKLKSFCTAKETTIRVNRQ | |
| | | | | PTTWEKIFATYSSDKGLISR | |
| | | | | IYNELKQIYKKKTNNPIKKW | |
| | | | | AKDMNRHFSKEDIYAAKKHM | |
| | | | | KKCSSSLAIREMQIKTTMRY | |
| | | | | HLTPVRMAIIKKSGNNRCWR | |
| | | | | GCGEIGTLVHCWWDCKLVQP | |
| | | | | LWKSVWRFLRDLEL | |
| | | | | EIPFDPAIPLLGIYPKDYKS | |
| | | | | CCYKDTCTRMFIAALFTIAK | |
| | | | | TWNQPNCPTMIDWIKKMWHI | |
| | | | | YTMEYYAAIKNDEFISFVGT | |
| | | | | WMKLETIILSKLSQEQKTKH | |
| | | | | RIFSLIGGN | |
| | | | | (SEQ ID NO: 1554) | |
| Penelope | non-LTR | AAL14979.1 | Q95VB5 | MERSPEPSININGRHAVCTA | IPR000477, |
| | retrotransposon | | | TNMSYAKIKTKYKDSKRTIN | PF00078, |
| | | | | KFQLTLVKLTKLKSSLKFLL | cd00304 |
| | | | | KCRKSNLIPNFIKNLTQHLT | |
| | | | | ILTTDNKTHPDITRTLTRHT | |
| | | | | HFYHTKILNLLIKHKHNLLQ | |
| | | | | EQTKHMQKAKTNIEQLMTTD | |
| | | | | DAKAFFESERNIENKITTTL | |
| | | | | KKRQETKHDKLRDQRNLALA | |
| | | | | DNNTQREWFVNKTKIEFPPN | |
| | | | | VVALLAKGPKFALPISKRDF | |
| | | | | PLLKYIADGEELVQTIKEKE | |
| | | | | TQESARTKFSLLVKEHKTKN | |
| | | | | NQNSRDRAILDTVEQTRKLL | |
| | | | | KENINIKILSSDKGNKTVAM | |
| | | | | DEDEYKNKMTNILDDLCAYR | |
| | | | | TLRLDPTSRLQTKNNTFVAQ | |
| | | | | LFKMGLISKDERNKMTTTTA | |
| | | | | VPPRIYGLPKIHKEGTPLRP | |
| | | | | ICSSIGSPSYGLCKYIIQIL | |
| | | | | KNLTMDSRYNIKNAVDFKDR | |
| | | | | VNNSQIREEETLVSFDVVSL | |
| | | | | FPSIPIELALDTIRQKWTKL | |
| | | | | EEHTNIPKQLFMDIVRFCIE | |
| | | | | ENRYFKYEDKIYTQLKGMPM | |
| | | | | GSPASPVIADILMEELLDKI | |
| | | | | TDKLKIKPRLLTKYVDDLFA | |
| | | | | ITNKIDVENILKELNSFHKQ | |
| | | | | IKFTMELEKDGKLPFLDSIV | |
| | | | | SRMDNTLKIKWYRKPIASGR | |
| | | | | ILNFNSNHPKSMIINTALGC | |
| | | | | MNRMMKISDTIYHKEIEHEI | |
| | | | | KELLTKNDFPPNIIKTLLKR | |
| | | | | RQIERKKPTEPAKIYKSLIY | |
| | | | | VPRLSERLTNSDCYNKQDIK | |
| | | | | VAHKPTNTLQKFFNKIKSKI | |
| | | | | PMIEKSNVVYQIPCGGDNNN | |
| | | | | KCNSVYIGTTKSKLKTRISQ | |
| | | | | HKSDFKLRHQNNIQKTALMT | |
| | | | | HCIRSNHTPNFDETTILQQE | |
| | | | | QHYNKRHTLEMLHIINTPTY | |
| | | | | KRLNYKTDTENCAHLYRHLL | |
| | | | | NSQTTSVTISTSKSADV | |
| | | | | (SEQ ID NO: 1555) | |
| M-MLVRT | Retrovirus | ADS42990.1 | P03355660-1330 | TLNIEDEHRLHETSKEPDVS | IPR000477, |
| | | | | LGSTWLSDFPQAWAETGGMG | PF00078, |
| | | | | LAVRQAPLIIPLKATSTPVS | cd03715 |
| | | | | IKQYPMSQEARLGIKPHIQR | |
| | | | | LLDQGILVPCQSPWNTPLLP | |
| | | | | VKKPGTNDYRPVQDLREVNK | |
| | | | | RVEDIHPTVPNPYNLLSGLP | |
| | | | | PSHQWYTVLDLKDAFFCLRL | |
| | | | | HPTSQPLFAFEWRDPEMGIS | |
| | | | | GQLTWTRLPQGFKNSPTLFD | |
| | | | | EALHRDLADFRIQHPDLILL | |
| | | | | QYVDDLLLAATSELDCQQGT | |
| | | | | RALLQTLGNLGYRASAKKAQ | |
| | | | | ICQKQVKYLGYLLKEGQRWL | |
| | | | | TEARKETVMGQPTPKTPRQL | |
| | | | | REFLGTAGFCRLWIPGFAEM | |
| | | | | AAPLYPLTKTGTLFNWGPDQ | |
| | | | | QKAYQEIKQALLTAPALGLP | |
| | | | | DLTKPFELFVDEKQGYAKGV | |
| | | | | LTQKLGPWRRPVAYLSKKLD | |
| | | | | PVAAGWPPCLRMVAAIAVLT | |
| | | | | KDAGKLTMGQPLVILAPHAV | |
| | | | | EALVKQPPDRWLSNARMTHY | |
| | | | | QALLLDTDRVQFGPVVALNP | |
| | | | | ATLLPLPEEGLQHNCLDILA | |
| | | | | EAHGTRPDLTDQPLPDADHT | |
| | | | | WYTDGSSLLQEGQRKAGAAV | |
| | | | | TTETEVIWAKALPAGTSAQR | |
| | | | | AELIALTQALKMAEGKKLNV | |
| | | | | YTDSRYAFATAHIHGEIYRR | |
| | | | | RGLLTSEGKEIKNKDEILAL | |
| | | | | LKALFLPKRLSIIHCPGHQK | |
| | | | | GHSAEARGNRMADQAARKAA | |
| | | | | ITETPDTSTLL | |
| | | | | (SEQ ID NO: 1556) | |
| RSVRT | Retrovirus | AAC82561.1 | P03354709-1567 | TVALHLAIPLKWKPDHTPVW | IPR000477, |
| | | | | IDQWPLPEGKLVALTQLVEK | PF00078, |
| | | | | ELQLGHIEPSLSCWNTPVFV | cd01645 |
| | | | | IRKASGSYRLLHDLRAVNAK | |
| | | | | LVPFGAVQQGAPVLSALPRG | |
| | | | | WPLMVLDLKDCFFSIPLAEQ | |
| | | | | DREAFAFTLPSVNNQAPARR | |
| | | | | FQWKVLPQGMTCSPTICQLV | |
| | | | | VGQVLEPLRLKHPSLCMLHY | |
| | | | | MDDLLLAASSHDGLEAAGEE | |
| | | | | VISTLERAGFTISPDKVQRE | |
| | | | | PGVQYLGYKLGSTYVAPVGL | |
| | | | | VAEPRIATLWDVQKLVGSLQ | |
| | | | | WLRPALGIPPRLMGPFYEQL | |
| | | | | RGSDPNEAREWNLDMKMAWR | |
| | | | | EIVRLSTTAALERWDPALPL | |
| | | | | EGAVARCEQGAIGVLGQG | |
| | | | | LSTHPRPCLWLFSTQPTKAF | |
| | | | | TAWLEVLTLLITKLRASAVR | |
| | | | | TFGKEVDILLLPACFREDLP | |
| | | | | LPEGILLALKGFAGKIRSSD | |
| | | | | TPSIFDIARPLHVSLKVRVT | |
| | | | | DHPVPGPTVFTDASSSTHKG | |
| | | | | VVVWREGPRWEIKEIADLGA | |
| | | | | SVQQLEARAVAMALLLWPTT | |
| | | | | PTNVVTDSAFVAKMLLKMGQ | |
| | | | | EGVPSTAAAFILEDALSQRS | |
| | | | | AMAAVLHVRSHSEVPGFFTE | |
| | | | | GNDVADSQATFQAYPLREAK | |
| | | | | DLHTALHIGPRALSKACNIS | |
| | | | | MQQAREVVQTCPHCNSAPAL | |
| | | | | EAGVNPRGLGPLQIWQTDFT | |
| | | | | LEPRMAPRSWLAVTVDTASS | |
| | | | | AIVVTQHGRVTSVAVQHHWA | |
| | | | | TAIAVLGRPKAIKTDNGSCF | |
| | | | | TSKSTREWLARWGIAHTTGI | |
| | | | | PGNSQGQAMVERANRLLKDR | |
| | | | | IRVLAEGDGFMKRIPTSKQG | |
| | | | | ELLAKAMYALNHFERGENTK | |
| | | | | TPIQK | |
| | | | | HWRPTVLTEGPPVKIRIETG | |
| | | | | EWEKGWNVLVWGRGYAAVKN | |
| | | | | RDTDKVIWVPSRKVKPDITQ | |
| | | | | KDEVTKKDEASPLFAG | |
| | | | | (SEQ ID NO: 1557) | |
| AMVRT | Retrovirus | HW606680.1 | | TVALHLAIPLKWKPNHTPVW | IPR000477, |
| | | | | IDQWPLPEGKLVALTQLVEK | PF00078, |
| | | | | ELQLGHIEPSLSCWNTPVFV | cd01645 |
| | | | | IRKASGSYRLLHDLRAVNAK | |
| | | | | LVPFGAVQQGAPVLSALPRG | |
| | | | | WPLMVLDLKDCFFSIPLAEQ | |
| | | | | DREAFAFTLPSVNNQAPARR | |
| | | | | FQWKVLPQGMTCSPTICQLI | |
| | | | | VGQILEPLRLKHPSLRMLHY | |
| | | | | MDDLLLAASSHDGLEAAGEE | |
| | | | | VISTLERAGFTISPDKVQRE | |
| | | | | PGVQYLGYKLGSTYVAPVGL | |
| | | | | VAEPRIATLWDVQKLVGSLQ | |
| | | | | WLRPALGIPPRLMGPFYEQL | |
| | | | | RGSDPNEAREWNLDMKMAWR | |
| | | | | EIVQLSTTAALERWDPALPL | |
| | | | | EGAVARCEQGAIGVLGQGLS | |
| | | | | THPRPCLWLFSTQPTKAFTA | |
| | | | | WLEVLTLLITKLRASAVRTF | |
| | | | | GKEVDILLLPACFREDLPLP | |
| | | | | EGILLALRGFAGKIRSSDTP | |
| | | | | SIFDIARPLHVSLKVRVTDH | |
| | | | | PVPGPTVFTDASSSTHKGVV | |
| | | | | VWREGPRWEIKEIADLGASV | |
| | | | | QQLEARAVAMALLLWPTTPT | |
| | | | | NV | |
| | | | | VTDSAFVAKMLLKMGQEGVP | |
| | | | | STAAAFILEDALSQRSAMAA | |
| | | | | VLHVRSHSEVPGFFTEGNDV | |
| | | | | ADSQATFQAY | |
| | | | | (SEQ ID NO: 1558) | |
| HIVRT | Retrovirus | AAB50259.1 | P04585588-1147 | PISPIETVPVKLKPGMDGPK | IPR000477, |
| | | | | VKQWPLTEEKIKALVEICTE | PF00078, |
| | | | | MEKEGKISKIGPENPYNTPV | cd01645 |
| | | | | FAIKKKDSTKWRKLVDFREL | |
| | | | | NKRTQDFWEVQLGIPHPAGL | |
| | | | | KKKKSVTVLDVGDAYFSVPL | |
| | | | | DEDFRKYTAFTIPSINNETP | |
| | | | | GIRYQYNVLPQGWKGSPAIF | |
| | | | | QSSMTKILEPFRKQNPDIVI | |
| | | | | YQYMDDLYVGSDLEIGQHRT | |
| | | | | KIEELRQHLLRWGLTTPDKK | |
| | | | | HQKEPPFLWMGYELHPDKWT | |
| | | | | VQPIVLPEKDSWTVNDIQKL | |
| | | | | VGKLNWASQIYPGIKVRQLC | |
| | | | | KLLRGTKALTEVIPLTEEAE | |
| | | | | LELAENREILKEPVHGVYYD | |
| | | | | PSKDLIAEIQKQGQGQWTYQ | |
| | | | | IYQEPFKNLKTGKYARMRGA | |
| | | | | HTNDVKQLTEAVQKITTESI | |
| | | | | VIWGKTPKFKLPIQKETWET | |
| | | | | WWTEYWQATWIPEWEFVNTP | |
| | | | | PLVKLWYQLEKEPIVGAETF | |
| | | | | YVDGAANRETKLGKAGYVTN | |
| | | | | RGRQKVVTLTDTTNQKTELQ | |
| | | | | AIYLALQDSGLEVNIVTDSQ | |
| | | | | YALGIIQAQPDQSESELVNQ | |
| | | | | IIEQLIKKEKVYLAWVPAHK | |
| | | | | GIGGNEQVDKLVSAGIRKVL | |
| | | | | (SEQ ID NO: 1559) | |
| Ty1 | LTR | AAA66938.1 | Q07163-1+1218-1755+ | AVKAVKSIKPIRTTLRYDEA | IPR013103, |
| | retrotransposon | | | ITYNKDIKEKEKYIEAYHKE | PFO7727 |
| | | | | VNQLLKMKTWDTDEYYDRKE | |
| | | | | IDPKRVINSMFIFNKKRDGT | |
| | | | | HKARFVARGDIQHPDTYDSG | |
| | | | | MQSNTVHHYALMTSLSLALD | |
| | | | | NNYYITQLDISSAYLYADIK | |
| | | | | EELYIRPPPHLGMNDKLIRL | |
| | | | | KKSLYGLKQSGANWYETIKS | |
| | | | | YLIQQCGMEEVRGWSCVFKN | |
| | | | | SQVTICLFVDDMVLFSKNLN | |
| | | | | SNKRIIEKLKMQYDTKIINL | |
| | | | | GESDEEIQYDILGLEIKYQR | |
| | | | | GKYMKLGMENSLTEKIPKLN | |
| | | | | VPLNPKGRKLSAPGQPGLYI | |
| | | | | DQDELEIDEDEYKEKVHEMQ | |
| | | | | KLIGLASYVGYKFRFDLLYY | |
| | | | | INTLAQHILFPSRQVLDMTY | |
| | | | | ELIQFM | |
| | | | | WDTRDKQLIWHKNKPTEPDN | |
| | | | | KLVAISDASYGNQPYYKSQI | |
| | | | | GNIYLLNGKVIGGKSTKASL | |
| | | | | TCTSTTEAEIHAISESVPLL | |
| | | | | NNLSYLIQELNKKPIIKGLL | |
| | | | | TDSRSTISIIKSTNEEKFRN | |
| | | | | RFFGTKAMRLRDEVSGNNLY | |
| | | | | VYYIETKKNIADVMTKPLPI | |
| | | | | KTFKLLTNKWIH | |
| | | | | (SEQ ID NO: 1560) | |
| Brt | Diversity- | NP_958675.1 | Q775D8 | MGKRHRNLIDQITTWENLLD | IPR000477, |
| | Generating | | | AYRKTSHGKRRTWGYLEFKE | PF00078, |
| | Retro | | | YDLANLLALQAELKAGNYER | cd01646 |
| | element | | | GPYREFLVYEPKPRLISALE | |
| | | | | FKDRLVQHALCNIVAPIFEA | |
| | | | | GLLPYTYACRPDKGTHAGVC | |
| | | | | HVQAELRRTRATHFLKSDFS | |
| | | | | KFFPSIDRAALYAMIDKKIH | |
| | | | | CAATRRLLRVVLPDEGVGIP | |
| | | | | IGSLTSQLFANVYGGAVDRL | |
| | | | | LHDELKQRHWARYMDDIVVL | |
| | | | | GDDPEELRAVFYRLRDFASE | |
| | | | | RLGLKISHWQVAPVSRGINF | |
| | | | | LGYRIWPTHKLLRKSSVKRA | |
| | | | | KRKVANFIKHGEDESLQRFL | |
| | | | | ASWSGHAQWADTHNLFTWME | |
| | | | | EQYGIACH | |
| | | | | (SEQ ID NO: 1561) | |
| RT86 | Retron | AAA61471.1 | P23070 | MKSAEYLNTFRLRNLGLPVM | IPR000477, |
| | | | | NNLHDMSKATRISVETLRLL | PF00078, |
| | | | | IYTADFRYRIYTVEKKGPEK | cd03487 |
| | | | | RMRTIYQPSRELKALQGWVL | |
| | | | | RNILDKLSSSPFSIGFEKHQ | |
| | | | | SILNNATPHIGANFILNIDL | |
| | | | | EDFFPSLTANKVFGVFHSLG | |
| | | | | YNRLISSVLTKICCYKNLLP | |
| | | | | QGAPSSPKLANLICSKLDYR | |
| | | | | IQGYAGSRGLIYTRYADDLT | |
| | | | | LSAQSMKKVVKARDFLFSII | |
| | | | | PSEGLVINSKKTCISGPRSQ | |
| | | | | RKVTGLVISQEKVGIGREKY | |
| | | | | KEIRAKIHHIFCGKSSEIEH | |
| | | | | VRGWLSFILSVDSKSHRRLI | |
| | | | | TYISKLEKKYGKNPLNKAKT | |
| | | | | (SEQ ID NO: 1562) | |
| TERT | Telomerase | AAG23289.1 | 014746 | MPRAPRCRAVRSLLRSHYRE | IPR000477, |
| | | | | VLPLATFVRRLGPQGWRLVQ | PF00078, |
| | | | | RGDPAAFRALVAQCLVCVPW | cd01648 |
| | | | | DARPPPAAPSFRQVSCLKEL | |
| | | | | VARVLQRLCERGAKNVLAFG | |
| | | | | FALLDGARGGPPEAFTTSVR | |
| | | | | SYLPNTVTDALRGSGAWGLL | |
| | | | | LRRVGDDVLVHLLARCA | |
| | | | | LFVLVAPSCAYQVCGPPLYQ | |
| | | | | LGAATQARPPPHASGPRRRL | |
| | | | | GCERAWNHSVREAGVPLGLP | |
| | | | | APGARRRGGSASRSLPLPKR | |
| | | | | PRRGAAPEPERTPVGQGSWA | |
| | | | | HPGRTRGPSDRGFCVVSPAR | |
| | | | | PAEEATSLEGALSGTRHSHP | |
| | | | | SVGRQHHAGPPSTSRPPRPW | |
| | | | | DTPCPPVYAETKHFLYSSGD | |
| | | | | KEQLRPSFLLSSLRPSLTGA | |
| | | | | RRLVETIFLGSRPWMPGTPR | |
| | | | | RLPRLPQRYWQMRPLFLELL | |
| | | | | GNHAQCPYGVLLKTHCPLRA | |
| | | | | AVTPAAGVCAREKPQGSVAA | |
| | | | | PEEEDTDPRRLVQLLRQHSS | |
| | | | | PWQVYGFVRACLRRLVPPGL | |
| | | | | WGSRHNERRFLRNTKKFISL | |
| | | | | GKHAKLSLQELTWKMSVRDC | |
| | | | | AWLRRSPGVGCVPAAEHRLR | |
| | | | | EEILAKFLHWLMSVYVVELL | |
| | | | | RSFFYVTETTFQKNRLFFYR | |
| | | | | KSVWSKLQSIGIRQHLKRVQ | |
| | | | | LRELSEAEVRQHREARPALL | |
| | | | | TSRLRFIPKPDGLRPIVNMD | |
| | | | | YVVGARTFRREKRAERLTSR | |
| | | | | VKALFSVLNYERARRPGLLG | |
| | | | | ASVLGLDDIHRAWRTFVLRV | |
| | | | | RAQDPPPELYFVKVDVTGAY | |
| | | | | DTIPQDRLTEVIASIIKPQN | |
| | | | | TYCVRRYAVVQKAAHGHVRK | |
| | | | | AFKSHVSTLTDLQPYMRQFV | |
| | | | | AHLQETSPLRDAVVIEQSSS | |
| | | | | LNEASSGLFDVFLRFMCHHA | |
| | | | | VRIRGKSYVQCQGIPQGSIL | |
| | | | | STLLCSLCYGDMENKLFAGI | |
| | | | | RRDGLLLRLVDDFLLVTPHL | |
| | | | | THAKTFLRTLVRGVPEYGCV | |
| | | | | VNLRKTVVNFPVEDEALGGT | |
| | | | | AFVQMPAHGLFPWCGLLLDT | |
| | | | | RTLEVQSDYSSYARTSIRAS | |
| | | | | LTFNRGFKAGRNMRRKLFGV | |
| | | | | LRLKCHSLFLDLQVNSLQTV | |
| | | | | CTNIYKILLLQAYRFHACVL | |
| | | | | QLPFHQQVWKNPTFFLRVIS | |
| | | | | DTASLCYSILKAKNAGMSLG | |
| | | | | AKGAAGPLPSEAVQWLCHQA | |
| | | | | FLLKLTRHRVTYVPLLGSLR | |
| | | | | TAQTQLSRKLPGTTLTALEA | |
| | | | | AANPALPSDFKTILD | |
| | | | | (SEQ ID NO: 1563) | |
| Mauriceville | Retroplasmid | NC_001570.1 | Q36578 | MPNHRLPNCVSYLGENHELS | cd00304 |
| RT | | | | WLHGMFGLLKRSNPQTGGIL | |
| | | | | GWLNTGPNGFVKYMMNLMGH | |
| | | | | ARDKGDAKEYWRLGRSLMKN | |
| | | | | EAFQVQAFNHVCKHWYLDYK | |
| | | | | PHKIAKLLKEVREMVEIQPV | |
| | | | | CIDYKR | |
| | | | | VYIPKANGKQRPLGVPTVPW | |
| | | | | RVYLHMWNVLLVWYRIPEQD | |
| | | | | NQHAYFPKRGVFTAWRALWP | |
| | | | | KLDSQNIYEFDLKNFFPSVD | |
| | | | | LAYLKDKLMESGIPQDISEY | |
| | | | | LTVLNRSLVVLTSEDKIPEP | |
| | | | | HRDVIFNSDGTPNPNLPKDV | |
| | | | | QGRILKDPDFVEILRRRGFT | |
| | | | | DIATNGVPQGASTSCGLATY | |
| | | | | NVKELFKRYDELIMYADDGI | |
| | | | | LCRQDPSTPDFSVEEAGVVQ | |
| | | | | EPAKSGWIKQNGEFKKSVKF | |
| | | | | LGLEFIPANIPPLGEGEVKD | |
| | | | | YPRLRGATRNGSKMELSTEL | |
| | | | | QFLCYLSYKLRIKVLRDLYI | |
| | | | | QVLGYLPSVPLLRYRSLAEA | |
| | | | | INELSPKRITIGQFITSSFE | |
| | | | | EFTAWSPLKRMGFFFSSPAG | |
| | | | | PTILSSIFNNSTNLQEPSDS | |
| | | | | RLLYRKGSWVNIRFAAYLYS | |
| | | | | KLSEEKHGLVPKFLEKLREI | |
| | | | | NFALDKVDVTEIDSKLSRLM | |
| | | | | KFSVSAAYDEVGTLALKSLF | |
| | | | | KFRNSERESIKASFKQLREN | |
| | | | | GKIAEFSEARRLWFEILKLI | |
| | | | | RLDLFNASSLACDDLLSHLQ | |
| | | | | DRRSIKKWGSSDVLYLKSQR | |
| | | | | LMRTNKKQLQLDFEKKKNSL | |
| | | | | KKKLIKRRAKELRDTFKGKE | |
| | | | | NKEA | |
| | | | | (SEQ ID NO: 1564) | |
| RTX | Engineered | QFN49000.1 | | MILDTDYITEDGKPVIRIFK | IPR006134, |
| | polymerase | | | KENGEFKIEYDRTFEPYLYA | PF00136, |
| | | | | LLKDDSAIEEVKKITAERHG | cd05536 |
| | | | | TVVTVKRVEKVQKKFLGRPV | |
| | | | | EVWKLYFTHPQDVPAIMDKI | |
| | | | | REHPAVIDIYEYDIPFAIRY | |
| | | | | LIDKGLVPMEGDEELKLLAF | |
| | | | | DIETLYHEGEEFAEGPILMI | |
| | | | | SYADEEGARVITWKNVDLPY | |
| | | | | VDVVSTEREMIKRFLRVVKE | |
| | | | | KDPDVLITYNGDNFDFAYLK | |
| | | | | KRCEKLGINFALGRDGSEPK | |
| | | | | IQRMGDRFAVEVKGRIHFDL | |
| | | | | YPVIRRTINLPTYTLEAVYE | |
| | | | | AVFGQPKEKVYAEEITTAWE | |
| | | | | TGENLERVARYSMEDAKVTY | |
| | | | | ELGKEFLPMEAQLSRLIGQS | |
| | | | | LWDVSRSSTGNLVEWFLLRK | |
| | | | | AYERNELAPNKPDEKELARR | |
| | | | | HQSHEGGYIKEPERGLWENI | |
| | | | | VYLDFRSLYPSIIITHNVSP | |
| | | | | DTLNREGCKEYDVAPQVGHR | |
| | | | | FCKDFPGFIPSLLGDLLEER | |
| | | | | QKIKKRMKATIDPIERKLLD | |
| | | | | YRQRAIKILANSLYGYYGYA | |
| | | | | RARWYCKECAESVIAWGREY | |
| | | | | LTMTIKEIEEKYGFKVIYSD | |
| | | | | TDGFFATIPGADAETVKKKA | |
| | | | | MEFLKYINAKLPGALELEYE | |
| | | | | GFYKRGLFVTKKKYAVIDEE | |
| | | | | GKITTRGLEIVRRDWSEIAK | |
| | | | | ETQARVLEALLKDGDVEKAV | |
| | | | | RIVKEVTEKLSKYEVPPEKL | |
| | | | | VIHKQITRDLKDYKATGPHV | |
| | | | | AVAKRLAARGVKIRPGTVIS | |
| | | | | YIVLKGSGRIVDRAIPFDEF | |
| | | | | DPTKHKYDAEYYIEKQVLPA | |
| | | | | VERILRAFGYRKEDLRYQKT | |
| | | | | RQVGLSARLKPKGTLEGSSH | |
| | | | | HHHHH | |
| | | | | (SEQ ID NO: 1565) | |

TABLE 2
InterPro descriptions of signatures present in reverse transcriptases in Table 1.

| | | Short | |
|---|---|---|---|
| Signature | Database | Name | Description |
| cd00304 | CDD | RT_like | RT_like: Reverse transcriptase (RT, RNA-dependent |
| | | | DNA polymerase)_like family. An RT gene is usually |
| | | | indicative of a mobile element such as a retrotransposon |
| | | | or retrovirus. RTs occur in a variety of mobile elements, |
| | | | including retrotransposons, retroviruses, group II introns, |
| | | | bacterial msDNAs, hepadnaviruses, and caulimoviruses. |
| | | | These elements can be divided into two major groups. |
| | | | One group contains retroviruses and DNA viruses whose |
| | | | propagation involves an RNA intermediate. They are |
| | | | grouped together with transposable elements containing |
| | | | long terminal repeats (LTRs). The other group, also called |
| | | | poly(A)-type retrotransposons, contain fungal |
| | | | mitochondrial introns and transposable elements that lack |
| | | | LTRs. [PMID: 1698615, PMID: 8828137, PMID: |
| | | | 10669612, PMID: 9878607, PMID: 7540934, PMID: |
| | | | 7523679, PMID: 8648598] |
| cd01645 | CDD | RT_Rtv | RT_Rtv: Reverse transcriptases (RTs) from retroviruses |
| | | | (Rtvs). RTs catalyze the conversion of single-stranded |
| | | | RNA into double-stranded viral DNA for integration into |
| | | | host chromosomes. Proteins in this subfamily |
| | | | contain long terminal repeats (LTRs) and |
| | | | are multifunctional enzymes with RNA- |
| | | | directed DNA polymerase, DNA directed |
| | | | DNA polymerase, and ribonuclease hybrid (RNase H) |
| | | | activities. The viral RNA genome enters the cytoplasm as |
| | | | part of a nucleoprotein complex, and the process of |
| | | | reverse transcription generates in the cytoplasm forming a |
| | | | linear DNA duplex via an intricate series of steps. This |
| | | | duplex DNA is colinear with its RNA template, but |
| | | | contains terminal duplications known as LTRs that are not |
| | | | present in viral RNA. It has been proposed that two |
| | | | specialized template switches, known as strand-transfer |
| | | | reactions or “jumps”, are required to generate the LTRs. |
| | | | [PMID: 9831551, PMID: 15107837, PMID: 11080630, |
| | | | PMID: 10799511, PMID: 7523679, PMID: 7540934, |
| | | | PMID: 8648598, PMID: 1698615] |
| cd01646 | CDD | RT_Bac_ | RT_Bac_retron_I: Reverse transcriptases (RTs) in |
| | | retron_I | bacterial retrotransposons or retrons. The polymerase |
| | | | reaction of this enzyme leads to the production of a |
| | | | unique RNA-DNA complex called msDNA (multicopy |
| | | | single-stranded (ss)DNA) in which a small ssDNA |
| | | | branches out from a small ssRNA molecule via a 2′- |
| | | | 5′phosphodiester linkage. Bacterial retron RTs produce |
| | | | cDNA corresponding to only a small portion of the retron |
| | | | genome. [PMID: 1698615, PMID: 16093702, PMID: |
| | | | 8828137] |
| cd01648 | CDD | TERT | TERT: Telomerase reverse transcriptase (TERT). |
| | | | Telomerase is a ribonucleoprotein (RNP) that synthesizes |
| | | | telomeric DNA repeats. The telomerase RNA subunit |
| | | | provides the template for synthesis of these repeats. The |
| | | | catalytic subunit of RNP is known as telomerase reverse |
| | | | transcriptase (TERT). The reverse transcriptase (RT) |
| | | | domain is located in the C-terminal region of the TERT |
| | | | polypeptide. Single amino acid substitutions in this region |
| | | | lead to telomere shortening and senescence. Telomerase is |
| | | | an enzyme that, in certain cells, maintains the physical |
| | | | ends of chromosomes (telomeres) during replication. In |
| | | | somatic cells, replication of the lagging strand requires the |
| | | | continual presence of an RNA primer approximately 200 |
| | | | nucleotides upstream, which is complementary to the |
| | | | template strand. Since there is a region of DNA less than |
| | | | 200 base pairs from the end of the chromosome where this |
| | | | is not possible, the chromosome is continually shortened. |
| | | | However, a surplus of repetitive DNA at the chromosome |
| | | | ends protects against the erosion of gene-encoding DNA. |
| | | | Telomerase is not normally expressed in somatic cells. It |
| | | | has been suggested that exogenous TERT may extend the |
| | | | lifespan of, or even immortalize, the cell. However, recent |
| | | | studies have shown that telomerase activity can be |
| | | | induced by a number of oncogenes. Conversely, the |
| | | | oncogene c-myc can be activated in human TERT |
| | | | immortalized cells. Sequence comparisons place the |
| | | | telomerase proteins in the RT family but reveal hallmarks |
| | | | that distinguish them from retroviral and retrotransposon |
| | | | relatives. [PMID: 9110970, PMID: 9288757, PMID: |
| | | | 9389643, PMID: 9671703, PMID: 9671704, PMID: |
| | | | 10333526, PMID: 11250070, PMID: 15363846, PMID: |
| | | | 16416120, PMID: 16649103, PMID: 16793225, PMID: |
| | | | 10860859, PMID: 9252327, PMID: 11602347, PMID: |
| | | | 1698615, PMID: 8828137, PMID: 10866187] |
| cd01650 | CDD | RT_nL | RT_nLTR: Non-LTR (long terminal repeat) |
| | | TR_like | retrotransposon and non-LTR retrovirus reverse |
| | | | transcriptase (RT). This subfamily contains both non-LTR |
| | | | retrotransposons and non-LTR retrovirus RTs. RTs |
| | | | catalyze the conversion of single-stranded RNA into |
| | | | double-stranded DNA for integration into host |
| | | | chromosomes. RT is a multifunctional enzyme with RNA- |
| | | | directed DNA polymerase, DNA directed DNA |
| | | | polymerase and ribonuclease hybrid (RNase H) activities. |
| | | | [PMID: 1698615, PMID: 10605110, PMID: 10628860, |
| | | | PMID: 11734649, PMID: 12117499, PMID: 12777502, |
| | | | PMID: 14871946, PMID: 15939396, PMID: 16271150, |
| | | | PMID: 16356661, PMID: 2463954, PMID: 3040362, |
| | | | PMID: 3656436, PMID: 7512193, PMID: 7534829, |
| | | | PMID: 7659515, PMID: 8524653, PMID: 9190061, |
| | | | PMID: 9218812, PMID: 9332379, PMID: 9364772, |
| | | | PMID: 8828137] |
| cd01651 | CDD | RT_G2_ | RT_G2_intron: Reverse transcriptases (RTs) with group II |
| | | intron | intron origin. RT transcribes DNA using RNA as |
| | | | template. Proteins in this subfamily are found in bacterial |
| | | | and mitochondrial group II introns. Their most probable |
| | | | ancestor was a retrotransposable element with both gag- |
| | | | like and pol-like genes. This subfamily of proteins |
| | | | appears to have captured the RT sequences from |
| | | | transposable elements, which lack long terminal repeats |
| | | | (LTRs). [PMID: 1698615, PMID: 8828137, PMID: |
| | | | 12403467, PMID: 11058141, PMID: 11054545, PMID: |
| | | | 10760141, PMID: 10488235, PMID: 9680217, PMID: |
| | | | 9491607, PMID: 7994604, PMID: 7823908, PMID: |
| | | | 3129199, PMID: 2531370, PMID: 2476655] |
| cd03487 | CDD | RT_Bac_ | RT_Bac_retron_II: Reverse transcriptases (RTs) in |
| | | retron_ | bacterial retrotransposons or retrons. The polymerase |
| | | II | reaction of this enzyme leads to the production of a |
| | | | unique RNA-DNA complex called msDNA (multicopy |
| | | | single-stranded (ss)DNA) in which a small ssDNA |
| | | | branches out from a small ssRNA molecule via a 2′- |
| | | | 5′phosphodiester linkage. Bacterial retron RTs produce |
| | | | cDNA corresponding to only a small portion of the retron |
| | | | genome. [PMID: 1698615, PMID: 8828137, PMID: |
| | | | 11292805, PMID: 9281493, PMID: 2465092, PMID: |
| | | | 1722556, PMID: 1701261, PMID: 1689062] |
| cd03715 | CDD | RT_ZF | RT_ZFREV like: A subfamily of reverse transcriptases |
| | | REV_ | (RTs) found in sequences similar to the intact endogenous |
| | | like | retrovirus ZFERV from zebrafish and to Moloney murine |
| | | | leukemia virus RT. An RT gene is usually indicative of a |
| | | | mobile element such as a retrotransposon or retrovirus. |
| | | | RTs occur in a variety of mobile elements, including |
| | | | retrotransposons, retroviruses, group II introns, bacterial |
| | | | msDNAs, hepadnaviruses, and caulimoviruses. These |
| | | | elements can be divided into two major groups. One |
| | | | group contains retroviruses and DNA viruses whose |
| | | | propagation involves an RNA intermediate. They are |
| | | | grouped together with transposable elements containing |
| | | | long terminal repeats (LTRs). The other group, also called |
| | | | poly(A)-type retrotransposons, contain fungal |
| | | | mitochondrial introns and transposable elements that lack |
| | | | LTRs. Phylogenetic analysis suggests that ZFERV |
| | | | belongs to a distinct group of retroviruses. [PMID: |
| | | | 14694121, PMID: 2410413, PMID: 9684890, PMID: |
| | | | 10669612, PMID: 1698615, PMID: 8828137] |
| cd05536 | CDD | POLBc_ | DNA polymerase type-B B3 subfamily catalytic domain. |
| | | B3 | Archaeal proteins that are involved in DNA replication |
| | | | are similar to those from eukaryotes. Some members of |
| | | | the archaea also possess multiple family B DNA |
| | | | polymerases (B1, B2 and B3). So far there is no specific |
| | | | function(s) has been assigned for different members of the |
| | | | archaea type B DNA polymerases. Phylogenetic analyses |
| | | | of eubacterial, archaeal, and eukaryotic family B DNA |
| | | | polymerases are support independent gene duplications |
| | | | during the evolution of archaeal and eukaryotic family B |
| | | | DNA polymerases. Structural comparison of the |
| | | | thermostable DNA polymerase type B to its mesostable |
| | | | homolog suggests several adaptations to high temperature |
| | | | such as shorter loops, disulfide bridges, and increasing |
| | | | electrostatic interaction at subdomain interfaces. [PMID: |
| | | | 10997874, PMID: 11178906, PMID: 10860752, PMID: |
| | | | 10097083, PMID: 10545321] |
| cd05780 | CDD | DNA_ | The 3′-5′ exonuclease domain of archaeal family-B DNA |
| | | polB_ | polymerases with similarity to Pyrococcus kodakaraensis |
| | | Kod1_ | Kod1, including polymerases from Desulfurococcus (D. |
| | | like_exo | Tok Pol) and Thermococcus gorgonarius (Tgo Pol). |
| | | | Kod1, D. Tok Pol, and Tgo Pol are thermostable enzymes |
| | | | that exhibit both polymerase and 3′-5′ exonuclease |
| | | | activities. They are family-B DNA polymerases. Their |
| | | | amino termini harbor a DEDDy-type DnaQ-like 3′-5′ |
| | | | exonuclease domain that contains three sequence motifs |
| | | | termed Exol, Exoll and ExoIII, with a specific YX(3)D |
| | | | pattern at ExoIII. These motifs are clustered around the |
| | | | active site and are involved in metal binding and catalysis. |
| | | | The exonuclease domain of family B polymerases |
| | | | contains a beta hairpin structure that plays an important |
| | | | role in active site switching in the event of nucleotide |
| | | | misincorporation. Members of this subfamily show |
| | | | similarity to eukaryotic DNA polymerases involved in |
| | | | DNA replication. Some archaea possess multiple family- |
| | | | B DNA polymerases. Phylogenetic analyses of |
| | | | eubacterial, archaeal, and eukaryotic family-B DNA |
| | | | polymerases support independent gene duplications |
| | | | during the evolution of archaeal and eukaryotic family-B |
| | | | DNA polymerases. [PMID: 18355915, PMID: 16019029, |
| | | | PMID: 11178906, PMID: 10860752, PMID: 10097083, |
| | | | PMID: 10545321, PMID: 9098062, PMID: 12459442, |
| | | | PMID: 16230118, PMID: 11988770, PMID: 11222749, |
| | | | PMID: 17098747, PMID: 8594362, PMID: 9729885] |
| PF00078 | Pfam | RVT_1 | A reverse transcriptase gene is usually indicative of a |
| | | | mobile element such as a retrotransposon or retrovirus. |
| | | | Reverse transcriptases occur in a variety of mobile |
| | | | elements, including retrotransposons, retroviruses, group |
| | | | II introns, bacterial msDNAs, hepadnaviruses, and |
| | | | caulimoviruses. [PMID: 1698615] |
| PF00136 | Pfam | DNA_ | This region of DNA polymerase B appears to consist of |
| | | pol B | more than one structural domain, possibly including |
| | | | elongation, DNA-binding and dNTP binding activities. |
| | | | [PMID: 9757117, PMID: 8679562] |
| PF07727 | Pfam | RVT_2 | A reverse transcriptase gene is usually indicative of a |
| | | | mobile element such as a retrotransposon or retrovirus. |
| | | | Reverse transcriptases occur in a variety of mobile |
| | | | elements, including retrotransposons, retroviruses, group |
| | | | II introns, bacterial msDNAs, hepadnaviruses, and |
| | | | caulimoviruses. This Pfam entry includes reverse |
| | | | transcriptases not recognised by the Pfam:PF00078 |
| | | | model. [PMID: 1698615] |
| IPR000477 | InterPro | RT_ | The use of an RNA template to produce DNA, for |
| | | dom | integration into the host genome and exploitation of a host |
| | | | cell, is a strategy employed in the replication of retroid |
| | | | elements, such as the retroviruses and bacterial retrons. |
| | | | The enzyme catalysing polymerisation is an RNA- |
| | | | directed DNA-polymerase, or reverse trancriptase (RT) |
| | | | (2.7.7.49). Reverse transcriptase occurs in a variety of |
| | | | mobile elements, including retrotransposons, retroviruses, |
| | | | group II introns [PMID: 12758069], bacterial msDNAs, |
| | | | hepadnaviruses, and caulimoviruses. Retroviral reverse |
| | | | transcriptase is synthesised as part of the POL polyprotein |
| | | | that contains; an aspartyl protease, a reverse transcriptase, |
| | | | RNase H and integrase. POL polyprotein undergoes |
| | | | specific enzymatic cleavage to yield the mature proteins. |
| | | | The discovery of retroelements in the prokaryotes raises |
| | | | intriguing questions concerning their roles in bacteria and |
| | | | the origin and evolution of reverse transcriptases and |
| | | | whether the bacterial reverse transcriptases are older than |
| | | | eukaryotic reverse transcriptases [PMID: 8828137], |
| | | | Several crystal structures of the reverse transcriptase (RT) |
| | | | domain have been determined [PMID: 1377403]. |
| IPR006134 | InterPro | DNA- | DNA is the biological information that instructs cells how |
| | | dir_ | to exist in an ordered fashion: accurate replication is thus |
| | | DNA_pol_ | one of the most important events in the life cycle of a cell. |
| | | B_multi_ | This function is performed by DNA-directed DNA- |
| | | dom | polymerases 2.7.7.7) by adding nucleotide triphosphate |
| | | | (dNTP) residues to the 5′ end of the growing chain of |
| | | | DNA, using a complementary DNA chain as a template. |
| | | | Small RNA molecules are generally used as primers for |
| | | | chain elongation, although terminal proteins may also be |
| | | | used for the de novo synthesis of a DNA chain. Even |
| | | | though there are 2 different methods of priming, these are |
| | | | mediated by 2 very similar polymerases classes, A and B, |
| | | | with similar methods of chain elongation. A number of |
| | | | DNA polymerases have been grouped under the |
| | | | designation of DNA polymerase family B. Six regions of |
| | | | similarity (numbered from 1 to VI) are found in all or a |
| | | | subset of the B family polymerases. The most conserved |
| | | | region (I) includes a conserved tetrapeptide with two |
| | | | aspartate residues. It has been suggested that it may be |
| | | | involved in binding a magnesium ion. All sequences in |
| | | | the B family contain a characteristic DTDS motif, (SEQ |
| | | | ID NO: 1566) and possess many functional domains, |
| | | | including a 5′-3′ elongation domain, a 3′-5′ exonuclease |
| | | | domain [PMID: 8679562], a DNA binding domain, and |
| | | | binding domains for both dNTP's and pyrophosphate |
| | | | [PMID: 9757117]. This domain of DNA polymerase B |
| | | | appears to consist of more than one activities, possibly |
| | | | including elongation, DNA-binding and dNTP binding |
| | | | [PMID: 9757117]. |
| IPR013103 | InterPro | RVT_2 | A reverse transcriptase gene is usually indicative of a |
| | | | mobile element such as a retrotransposon or retrovirus. |
| | | | Reverse transcriptases occur in a variety of mobile |
| | | | elements, including retrotransposons, retroviruses, group |
| | | | II introns, bacterial msDNAs, hepadnaviruses, and |
| | | | caulimoviruses. This entry includes reverse transcriptases |
| | | | not recognised by IPR000477 [PMID: 1698615]. |

TABLE 30
Exemplary monomeric retroviral reverse transcriptases
and their RT domain signatures

| | | | | RT |
|---|---|---|---|---|
| Name | Accession | Organism | Sequence | Signatures |
| Q4VF | Q4VFZ2 | Porcine | MGATGQQQYPWTTRRTVDLG | IPR043502, |
| Z2_9 | | endogeno | VGRVTHSFLVIPECPAPLLG | SSF56672, |
| GAMR- | | US | RDLLTKMGAQISFEQGKPEV | IPR000477, |
| residues | | retrovirus | SANNKPITVLTLQLDDEYRL | PF00078, |
| only | | | YSPLVKPDQNIQFWLEQFPQ | cd03715 |
| | | | AWAETAGMGLAKQVPPQVIQ | |
| | | | LKASATPVSVRQYPLSKEAQ | |
| | | | EGIRPHVQRLIQQGILVPVQ | |
| | | | SPWNTPLLPVRKPGTNDYRP | |
| | | | VQDLREVNKRVQDIHPTVPN | |
| | | | PYNLLCALPPQRSWYTVLDL | |
| | | | KDAFFCLRLHPTSQPLFAFE | |
| | | | WRDPGTGRTGQLTWTRLPQG | |
| | | | FKNSPTIFDEALHRDLANFR | |
| | | | IQHPQVTLLQYVDDLLLAGA | |
| | | | TKQDCLEGTKALLLELSDLG | |
| | | | YRASAKKAQICRREVTYLGY | |
| | | | SLRDGQRWLTEARKKTVVQI | |
| | | | PAPTTAKQVREFLGTAGFCR | |
| | | | LWIPGFATLAAPLYPLTKEK | |
| | | | GEFSWAPEHQKAFDAIKKAL | |
| | | | LSAPALALPDVTKPFTLYVD | |
| | | | ERKGVARGVLTQTLGPWRRP | |
| | | | VAYLSKKLDPVASGWPVCLK | |
| | | | AIAAVAILVKDADKLTLGQN | |
| | | | ITVIAPHALENIVRQPPDRW | |
| | | | MTNARMTHYQSLLLTERVTF | |
| | | | APPAALNPATLLPEETDEPV | |
| | | | THDCHQLLIEETGVRKDLTD | |
| | | | IPLTGEVLTWFTDGSSYVVE | |
| | | | GKRMAGAAVVDGTRTIWASS | |
| | | | LPEGTSAQKAELMALTQALR | |
| | | | LAEGKSINIYTDSRYAFATA | |
| | | | HVHGAIYKQRGLLTSAGREI | |
| | | | KNKEEILSLLEALHLPKRLA | |
| | | | IIHCPGHQKAKDPISRGNQM | |
| | | | ADRVAKQAAQGVNLLPMIET | |
| | | | PKAPEPGRQYTLEDWQEIKK | |
| | | | IDQFSETPEGTCYTSDGKEI | |
| | | | LPHKEGLEYVQQIHRLTHLG | |
| | | | TKHLQQLVRTSPYHVLRLPG | |
| | | | VADSVVKHCVPCQLVNANPS | |
| | | | RIPPGKRLRGSHPGAHWEVD | |
| | | | FTEVKPAKYGNKYLLVFVDT | |
| | | | FSGWVEAYPTKKETSTVVAK | |
| | | | KILEEIFPRFGIPKVIGSDN | |
| | | | GPAFVAQVSQGLAKILGIDW | |
| | | | KLHCAYRPQSSGQVERMNRT | |
| | | | IKETLTKLTAETGVNDWIAL | |
| | | | LPFVLFRVRNTPGQFGLTPY | |
| | | | ELLYGGPPPLVEIASVHSAD | |
| | | | VLLSQPLFSRLKALEWVRQR | |
| | | | AWRQLREAYSGGGDLQIPHR | |
| | | | FQVGDSVYVRRHRAGNLETR | |
| | | | WKGPYHVLLTTPTAVKVEGI | |
| | | | STWIHASHVKPAPPPDSGWK | |
| | | | AEKTENPLKLRLHRVVPYSV | |
| | | | NNFSS | |
| | | | (SEQ ID NO: 1567) | |
| POL_ | P23074 | Simian | MDPLQLLQPLEAEIKGTKLK | IPR043502, |
| SFV1- | | foamy | AHWDSGATITCVPEAFLEDE | SSF56672, |
| residues | | virus | RPIQTMLIKTIHGEKQQDVY | IPR000477, |
| only | | type | YLTFKVQGRKVEAEVLASPY | PF00078 |
| | | 1 | DYILLNPSDVPWLMKKPLQL | |
| | | | TVLVPLHEYQERLLQQTALP | |
| | | | KEQKELLQKLFLKYDALWQH | |
| | | | WENQVGHRRIKPHNIATGTL | |
| | | | APRPQKQYPINPKAKPSIQI | |
| | | | VIDDLLKQGVLIQQNSTMNT | |
| | | | PVYPVPKPDGKWRMVLDYRE | |
| | | | VNKTIPLIAAQNQHSAGILS | |
| | | | SIYRGKYKTTLDLTNGFWAH | |
| | | | PITPESYWLTAFTWQGKQYC | |
| | | | WTRLPQGFLNSPALFTADVV | |
| | | | DLLKEIPNVQAYVDDIYISH | |
| | | | DDPQEHLEQLEKIFSILLNA | |
| | | | GYVVSLKKSEIAQREVEFLG | |
| | | | FNITKEGRGLTDTFKQKLLN | |
| | | | ITPPKDLKQLQSILGLLNFA | |
| | | | RNFIPNYSELVKPLYTIVAN | |
| | | | ANGKFISWTEDNSNQLQHII | |
| | | | SVLNQADNLEERNPETRLII | |
| | | | KVNSSPSAGYIRYYNEGSKR | |
| | | | PIMYVNYIFSKAEAKFTQTE | |
| | | | KLLTTMHKGLIKAMDLAMGQ | |
| | | | EILVYSPIVSMTKIQRTPLP | |
| | | | ERKALPVRWITWMTYLEDPR | |
| | | | IQFHYDKSLPELQQIPNVTE | |
| | | | DVIAKTKHPSEFAMVFYTDG | |
| | | | SAIKHPDVNKSHSAGMGIAQ | |
| | | | VQFIPEYKIVHQWSIPLGDH | |
| | | | TAQLAEIAAVEFACKKALKI | |
| | | | SGPVLIVTDSFYVAESANKE | |
| | | | LPYWKSNGFLNNKKKPLRHV | |
| | | | SKWKSIAECLQLKPDIIIMH | |
| | | | EKGHQQPMTTLHTEGNNLAD | |
| | | | KLATQGSYVVHCNTTPSLDA | |
| | | | ELDQLLQGHYPPGYPKQYKY | |
| | | | TLEENKLIVERPNGIRIVPP | |
| | | | KADREKIISTAHNIAHTGRD | |
| | | | ATFLKVSSKYWWPNLRKDVV | |
| | | | KSIRQCKQCLVTNATNLTSP | |
| | | | PILRPVKPLKPFDKFYIDYI | |
| | | | GPLPPSNGYLHVLVVVDSMT | |
| | | | GFVWLYPTKAPSTSATVKAL | |
| | | | NMLTSIAIPKVLHSDQGAAF | |
| | | | TSSTFADWAKEKGIQLEFST | |
| | | | PYHPQSSGKVERKNSDIKRL | |
| | | | LTKLLIGRPAKWYDLLPVVQ | |
| | | | LALNNSYSPSSKYTPHQLLF | |
| | | | GVDSNTPFANSDTLDLSREE | |
| | | | ELSLLQEIRSSLHQPTSPPA | |
| | | | SSRSWSPSVGQLVQERVARP | |
| | | | ASLRPRWHKPTAILEVVNPR | |
| | | | TVIILDHLGNRRTVSVDNLK | |
| | | | LTAYQDNGTSNDSGTMALME | |
| | | | EDESSTSST | |
| | | | (SEQ ID NO: 1568) | |
| POL_ | P07572 | Mason- | MGQELSQHERYVEQLKQALK | IPR043502, |
| MPMV- | | Pfizer | TRGVKVKYADLLKFFDFVKD | SSF56672, |
| residues | | monkey | TCPWFPQEGTIDIKRWRRVG | IPR000477, |
| only | | virus | DCFQDYYNTFGPEKVPVTAF | PF00078, |
| | | | SYWNLIKELIDKKEVNPQVM | cd01645, |
| | | | AAVAQTEEILKSNSQTDLTK | PFO6817, |
| | | | TSQNPDLDLISLDSDDEGAK | IPRO10661 |
| | | | SSSLQDKGLSSTKKPKRFPV | |
| | | | LLTAQTSKDPEDPNPSEVDW | |
| | | | DGLEDEAAKYHNPDWPPFLT | |
| | | | RPPPYNKATPSAPTVMAVVN | |
| | | | PKEELKEKIAQLEEQIKLEE | |
| | | | LHQALISKLQKLKTGNETVT | |
| | | | HPDTAGGLSRTPHWPGQHIP | |
| | | | KGKCCASREKEEQIPKDIFP | |
| | | | VTETVDGQGQAWRHHNGFDF | |
| | | | AVIKELKTAASQYGATAPYT | |
| | | | LAIVESVADNWLTPTDWNTL | |
| | | | VRAVLSGGDHLLWKSEFFEN | |
| | | | CRDTAKRNQQAGNGWDFDML | |
| | | | TGSGNYSSTDAQMQYDPGLF | |
| | | | AQIQAAATKAWRKLPVKGDP | |
| | | | GASLTGVKQGPDEPFADFVH | |
| | | | RLITTAGRIFGSAEAGVDYV | |
| | | | KQLAYENANPACQAAIRPYR | |
| | | | KKTDLTGYIRLCSDIGPSYQ | |
| | | | QGLAMAAAFSGQTVKDFLNN | |
| | | | KNKEKGGCCFKCGKKGHFAK | |
| | | | NCHEHAHNNAEPKVPGLCPR | |
| | | | CKRGKHWANECKSKTDNQGN | |
| | | | PIPPHQGNRVEGPAPGPETS | |
| | | | LWGSQLCSSQQKQPISKLTR | |
| | | | ATPGSAGLDLCSTSHTVLTP | |
| | | | EMGPQALSTGIYGPLPPNTF | |
| | | | GLILGRSSITMKGLQVYPGV | |
| | | | IDNDYTGEIKIMAKAVNNIV | |
| | | | TVSQGNRIAQLILLPLIETD | |
| | | | NKVQQPYRGQGSFGSSDIYW | |
| | | | VQPITCQKPSLTLWLDDKMF | |
| | | | TGLIDTGADVTIIKLEDWPP | |
| | | | NWPITDTLTNLRGIGQSNNP | |
| | | | KQSSKYLTWRDKENNSGLIK | |
| | | | PFVIPNLPVNLWGRDLLSQM | |
| | | | KIMMCSPNDIVTAQMLAQGY | |
| | | | SPGKGLGKKENGILHPIPNQ | |
| | | | GQSNKKGFGNFLTAAIDILA | |
| | | | PQQCAEPITWKSDEPVWVDQ | |
| | | | WPLTNDKLAAAQQLVQEQLE | |
| | | | AGHITESSSPWNTPIFVIKK | |
| | | | KSGKWRLLQDLRAVNATMVL | |
| | | | MGALQPGLPSPVAIPQGYLK | |
| | | | IIIDLKDCFFSIPLHPSDQK | |
| | | | RFAFSLPSTNFKEPMQRFQW | |
| | | | KVLPQGMANSPTLCQKYVAT | |
| | | | AIHKVRHAWKQMYIIHYMDD | |
| | | | ILIAGKDGQQVLQCFDQLKQ | |
| | | | ELTAAGLHIAPEKVQLQDPY | |
| | | | TYLGFELNGPKITNQKAVIR | |
| | | | KDKLQTLNDFQKLLGDINWL | |
| | | | RPYLKLTTGDLKPLFDTLKG | |
| | | | DSDPNSHRSLSKEALASLEK | |
| | | | VETAIAEQF | |
| | | | VTHINYSLPLIFLIFNTALT | |
| | | | PTGLFWQDNPIMWIHLPASP | |
| | | | KKVLLPYYDAIADLIILGRD | |
| | | | HSKKYFGIEPSTIIQPYSKS | |
| | | | QIDWLMQNTEMWPIACASFV | |
| | | | GILDNHYPPNKLIQFCKLHT | |
| | | | FVFPQIISKTPLNNALLVFT | |
| | | | DGSSTGMAAYTLTDTTIKFQ | |
| | | | TNLNSAQLVELQALIAVLSA | |
| | | | FPNQPLNIYTDSAYLAHSIP | |
| | | | LLETVAQIKHISETAKLFLQ | |
| | | | CQQLIYNRSIPFYIGHVRAH | |
| | | | SGLPGPIAQGNQRADLATKI | |
| | | | VASNINTNLESAQNAHTLHH | |
| | | | LNAQTLRLMFNIPREQARQI | |
| | | | VKQCPICVTYLPVPHLGVNP | |
| | | | RGLFPNMIWQMDVTHYSEFG | |
| | | | NLKYIHVSIDTFSGFLLATL | |
| | | | QTGETTKHVITHLLHCFSII | |
| | | | GLPKQIKTDNGPGYTSKNFQ | |
| | | | EFCSTLQIKHITGIPYNPQG | |
| | | | QGIVERAHLSLKTTIEKIKK | |
| | | | GEWYPRKGTPRNILNHALFI | |
| | | | LNFLNLDDQNKSAADRFWHN | |
| | | | NPKKQFAMVKWKDPLDNTWH | |
| | | | GPDPVLIWGRGSVCVYSQTY | |
| | | | DAARWLPERLVRQVSNNNQS | |
| | | | RE | |
| | | | (SEQ ID NO: 1569) | |
| POL_ | P03365 | Mouse | MGVSGSKGQKLFVSVLQRLL | IPR043502, |
| MMT | | mammary | SERGLHVKESSAIEFYQFLI | SSF56672, |
| VB- | | tumor | KVSPWFPEEGGLNLQDWKRV | IPR000477, |
| residues | | virus | GREMKRYAAEHGTDSIPKQA | PF00078, |
| only | | | YPIWLQLREILTEQSDLVLL | cd01645, |
| | | | SAEAKSVTEEELEEGLTGLL | PFO6817, |
| | | | STSSQEKTYGTRGTAYAEID | IPRO10661 |
| | | | TEVDKLSEHIYDEPYEEKEK | |
| | | | ADKNEEKDHVRKIKKVVQRK | |
| | | | ENSEGKRKEKDSKAFLATDW | |
| | | | NDDDLSPEDWDDLEEQAAHY | |
| | | | HDDDELILPVKRKVVKKKPQ | |
| | | | ALRRKPLPPVGFAGAMAEAR | |
| | | | EKGDLTFTFPVVFMGESDED | |
| | | | DTPVWEPLPLKTLKELQSAV | |
| | | | RTMGPSAPYTLQVVDMVASQ | |
| | | | WLTPSDWHQTARATLSPGDY | |
| | | | VLWRTEYEEKSKEMVQKAAG | |
| | | | KRKGKVSLDMLLGTGQFLSP | |
| | | | SSQIKLSKDVLKDVTTNAVL | |
| | | | AWRAIPPPGVKKTVLAGLKQ | |
| | | | GNEESYETFISRLEEAVYRM | |
| | | | MPRGEGSDILIKQLAWENAN | |
| | | | SLCQDLIRPIRKTGTIQDYI | |
| | | | RACLDASPAVVQGMAYAAAM | |
| | | | RGQKYSTFVKQTYGGGKGGQ | |
| | | | GAEGPVCFSCGKTGHIRKDC | |
| | | | KDEKGSKRAPPGLCPRCKKG | |
| | | | YHWKSECKSKFDKDGNPLPP | |
| | | | LETNAENSKNLVKGQSPSPA | |
| | | | QKGDGVKGSGLNPEAPPFTI | |
| | | | HDLPRGTPGSAGLDLSSQKD | |
| | | | LILSLEDGVSLVPTLVKGTL | |
| | | | PEGTTGLIIGRSSNYKKGLE | |
| | | | VLPGVIDSDFQGEIKVMVKA | |
| | | | AKNAVIIHKGERIAQLLLLP | |
| | | | YLKLPNPVIKEERGSEGFGS | |
| | | | TSHVHWVQEISDSRPMLHIY | |
| | | | LNGRRFLGLLDTGADKTCIA | |
| | | | GRDWPANWPIHQTESSLQGL | |
| | | | GMACGVARSSQPLRWQHEDK | |
| | | | SGIIHPFVIPTLPFTLWGRD | |
| | | | IMKDIKVRLMTDSPDDSQDL | |
| | | | MIGAIESNLFADQISWKSDQ | |
| | | | PVWLNQWPLKQEKLQALQQL | |
| | | | VTEQLQLGHLEESNSPWNTP | |
| | | | VFVIKKKSGKWRLLQDLRAV | |
| | | | NATMHDMGALQPGLPSPVAV | |
| | | | PKGWEIIIIDLQDCFFNIKL | |
| | | | HPEDCKRFAFSVPSPNFKRP | |
| | | | YQRFQWKVLPQGMKNSPTLC | |
| | | | QKFVDKAILTVRDKYQDSYI | |
| | | | VHYMDDILLAHPSRSIVDEI | |
| | | | LTSMIQALNKHGLVVSTEKI | |
| | | | QKYDNLKYLGTHIQGDSVSY | |
| | | | QKLQIRTDKLRTLNDFQKLL | |
| | | | GNINWIRPFLKLTTGELKPL | |
| | | | FEI | |
| | | | LNGDSNPISTRKLTPEACKA | |
| | | | LQLMNERLSTARVKRLDLSQ | |
| | | | PWSLCILKTEYTPTACL | |
| | | | WQDGVVEWIHLPHISPKVIT | |
| | | | PYDIFCTQ | |
| | | | LIIKGRHRSKELFSKDPDYI | |
| | | | VVPYTKVQFDLLLQEKEDWP | |
| | | | ISLLGFLGEVHFHLPKDPLL | |
| | | | TFTLQTAIIFPHMTSTTPLE | |
| | | | KGIVIFTDGSANGRSVTYIQ | |
| | | | GREPIIKENTQNTAQQAEIV | |
| | | | AVITAFEEVSQPFNLYTDSK | |
| | | | YVTGLFPEIETATLSPRTKI | |
| | | | YTELKHLQRLIHKRQEKFYI | |
| | | | GHIRGHTGLPGPLAQGNAYA | |
| | | | DSLTRILTALESAQESHALH | |
| | | | HQNAAALRFQFHITREQARE | |
| | | | IVKLCPNCPDWGHAPQLGVN | |
| | | | PRGLKPRVLWQMDVTHVSEF | |
| | | | GKLKYVHVTVDTYSHFTFAT | |
| | | | ARTGEATKDVLQHLAQSFAY | |
| | | | MGIPQKIKTDNAPAYVSRSI | |
| | | | QEFLARWKISHVTGIPYNPQ | |
| | | | GQAIVERTHQNIKAQLNKLQ | |
| | | | KAGKYYTPHHLLAHALFVLN | |
| | | | HVNMDNQGHTAAERHWGPIS | |
| | | | ADPKPMVMWKDLLTGSWKGP | |
| | | | DVLITAGRGYACVFPQDAET | |
| | | | PIWVPDRFIRPFTERKEATP | |
| | | | TPGTAEKTPPRDEKDQQESP | |
| | | | KNESSPHQREDGLATSAGVD | |
| | | | LRSGGGP | |
| | | | (SEQ ID NO: 1570) | |
| POL_ | P03355 | Moloney | MGQTVTTPLSLTLGHWKDVE | IPR043502, |
| MLV | | murine | RIAHNQSVDVKKRRWVTFCS | SSF56672, |
| MS- | | leukemia | AEWPTFNVGWPRDGTFNRDL | IPR000477, |
| residues | | virus | ITQVKIKVFSPGPHGHPDQV | PF00078, |
| only | | | PYIVTWEALAFDPPPWVKPF | cd03715 |
| | | | VHPKPPPPLPPSAPSLPLEP | |
| | | | PRSTPPRSSLYPALTPSLGA | |
| | | | KPKPQVLSDSGGPLIDLLTE | |
| | | | DPPPYRDPRPPPSDRDGNGG | |
| | | | EATPAGEAPDPSPMASRLRG | |
| | | | RREPPVADSTTSQAFPLRAG | |
| | | | GNGQLQYWPFSSSDLYNWKN | |
| | | | NNPSFSEDPGKLTALIESVL | |
| | | | ITHQPTWDDCQQLLGTLLTG | |
| | | | EEKQRVLLEARKAVRGDDGR | |
| | | | PTQLPNEVDAAFPLERPDWD | |
| | | | YTTQAGRNHLVHYRQLLLAG | |
| | | | LQNAGRSPTNLAKVKGITQG | |
| | | | PNESPSAFLERLKEAYRRYT | |
| | | | PYDPEDPGQETNVSMSFIWQ | |
| | | | SAPDIGRKLERLEDLKNKTL | |
| | | | GDLVREAEKIFNKRETPEER | |
| | | | EERIRRETEEKEERRRTEDE | |
| | | | QKEKERDRRRHREMSKLLAT | |
| | | | VVSGQKQDRQGGERRRSQLD | |
| | | | RDQCAYCKEKGHWAKDCPKK | |
| | | | PRGPRGPRPQTSLLTLDDQG | |
| | | | GQGQEPPPEPRITLKVGGQP | |
| | | | VTFLVDTGAQHSVLTQNPGP | |
| | | | LSDKSAWVQGATGGKRYRWT | |
| | | | TDRKVHLATGKVTHSFLHVP | |
| | | | DCPYPLLGRDLLTKLKAQIH | |
| | | | FEGSGAQVMGPMGQPLQVLT | |
| | | | LNIEDEHRLHETSKEPDVSL | |
| | | | GSTWLSDFPQAWAETGGMGL | |
| | | | AVRQAPLIIPLKATSTPVSI | |
| | | | KQYPMSQEARLGIKPHIQRL | |
| | | | LDQGILVPCQSPWNTPLLPV | |
| | | | KKPGTNDYRPVQDLREVNKR | |
| | | | VEDIHPTVPNPYNLLSGLPP | |
| | | | SHQWYTVLDLKDAFFCLRLH | |
| | | | PTSQPLFAFEWRDPEMGISG | |
| | | | QLTWTRLPQGFKNSPTLFDE | |
| | | | ALHRDLADFRIQHPDLILLQ | |
| | | | YVDDLLLAATSELDCQQGTR | |
| | | | ALLQTLGNLGYRASAKKAQI | |
| | | | CQKQVKYLGYLLKEGQRWLT | |
| | | | EARKETVMGQPTPKTPRQLR | |
| | | | EFLGTAGFCRLWIPGFAEMA | |
| | | | APLYPLTKTGTLFNWGPDQQ | |
| | | | KAYQEIKQALLTAPALGLPD | |
| | | | LTKPFELFVDEKQGYAKGVL | |
| | | | TQKLGPWRRPVAYLSKKLDP | |
| | | | VAAGWPPCLRMVAAIAVLTK | |
| | | | DAGKLTMGQPLVILAPHAVE | |
| | | | ALVKQPPDRWLSNARMTHYQ | |
| | | | ALLLDTDRVQFGPVVALNPA | |
| | | | TLLPLPEEGLQHNCLDILAE | |
| | | | AHGTRPDLTDQPLPDADHTW | |
| | | | YTDGSSLLQEGQRKAGAAVT | |
| | | | TETEVIWAKALPAGTSAQRA | |
| | | | ELIAL | |
| | | | TQALKMAEGKKLNVYTDSRY | |
| | | | AFATAHIHGEIYRRRGLLTS | |
| | | | EGKEIKNKDEILALLKALFL | |
| | | | PKRLSIIHCPGHQKGHSAEA | |
| | | | RGNRMADQAARKAAITETPD | |
| | | | TSTLLIENSSPYTSEHFHYT | |
| | | | VTDIKDLTKLGAIYDKTKKY | |
| | | | WVYQGKPVMPDQFTFELLDF | |
| | | | LHQLTHLSFSKMKALLERSH | |
| | | | SPYYMLNRDRTLKNITETCK | |
| | | | ACAQVNASKSAVKQGTRVRG | |
| | | | HRPGTHWEIDFTEIKPGLYG | |
| | | | YKYLLVFIDTFSGWIEAFPT | |
| | | | KKETAKVVTKKLLEEIFPRF | |
| | | | GMPQVLGTDNGPAFVSKVSQ | |
| | | | TVADLLGIDWKLHCAYRPQS | |
| | | | SGQVERMNRTIKETLTKLTL | |
| | | | ATGSRDWVLLLPLALYRARN | |
| | | | TPGPHGLTPYEILYGAPPPL | |
| | | | VNFPDPDMTRVTNSPSLQAH | |
| | | | LQALYLVQHEVWRPLAAAYQ | |
| | | | EQLDRPVVPHPYRVGDTVWV | |
| | | | RRHQTKNLEPRWKGPYTVLL | |
| | | | TTPTALKVDGIAAWIHAAHV | |
| | | | KAADPGGGPSSRLTWRVQRS | |
| | | | QNPLKIRLTREAP | |
| | | | (SEQ ID NO: 1571) | |
| POL_ | P03362 | Human T- | MGQIFSRSASPIPRPPRGLA | IPR043502, |
| HTL1 | | cell | AHHWLNFLQAAYRLEPGPSS | SSF56672, |
| A- | | leukemia | YDFHQLKKFLKIALETPARI | IPR000477, |
| residues | | virus 1 | CPINYSLLASLLPKGYPGRV | PF00078 |
| only | | | NEILHILIQTQAQIPSRPAP | |
| | | | PPPSSPTHDPPDSDPQIPPP | |
| | | | YVEPTAPQVLPVMHPHGAPP | |
| | | | NHRPWQMKDLQAIKQEVSQA | |
| | | | APGSPQFMQTIRLAVQQFDP | |
| | | | TAKDLQDLLQYLCSSLVASL | |
| | | | HHQQLDSLISEAETRGITGY | |
| | | | NPLAGPLRVQANNPQQQGLR | |
| | | | REYQQLWLAAFAALPGSAKD | |
| | | | PSWASILQGLEEPYHAFVER | |
| | | | LNIALDNGLPEGTPKDPILR | |
| | | | SLAYSNANKECQKLLQARGH | |
| | | | TNSPLGDMLRACQTWTPKDK | |
| | | | TKVLVVQPKKPPPNQPCFRC | |
| | | | GKAGHWSRDCTQPRPPPGPC | |
| | | | PLCQDPTHWKRDCPRLKPTI | |
| | | | PEPEPEEDALLLDLPADIPH | |
| | | | PKNLHRGGGLTSPPTLQQVL | |
| | | | PNQDPASILPVIPLDPARRP | |
| | | | VIKAQVDTQTSHPKTIEALL | |
| | | | DTGADMTVLPIALFSSNTPL | |
| | | | KNTSVLGAGGQTQDHFKLTS | |
| | | | LPVLIRLPFRTTPIVLTSCL | |
| | | | VDTKNNWAIIGRDALQQCQG | |
| | | | VLYLPEAKRPPVILPIQAPA | |
| | | | VLGLEHLPRPPQISQFPLNP | |
| | | | ERLQALQHLVRKALEAGHIE | |
| | | | PYTGPGNNPVFPVKKANGTW | |
| | | | RFIHDLRATNSLTIDLSSSS | |
| | | | PGPPDLSSLPTTLAHLQTID | |
| | | | LRDAFFQIPLPKQFQPYFAF | |
| | | | TVPQQCNYGPGTRYAWKVLP | |
| | | | QGFKNSPTLFEMQLAHILQP | |
| | | | IRQAFPQCTILQYMDDILLA | |
| | | | SPSHEDLLLLSEATMASLIS | |
| | | | HGLPVSENKTQQTPGTIKFL | |
| | | | GQIISPNHLTYDAVPTVPIR | |
| | | | SRWALPELQALLGEIQWVSK | |
| | | | GTPTLRQPLHSLYCALQRHT | |
| | | | DPRDQIYLNPSQVQSLVQLR | |
| | | | QALSQNCRSRLVQTLPLLGA | |
| | | | IMLTLTGTTTVVFQSKEQWP | |
| | | | LVWLHAPLPHTSQCPWGQLL | |
| | | | ASAVLLLDKYTLQSYGLLCQ | |
| | | | TIHHNISTQTFNQFIQTSDH | |
| | | | PSVPILLHHSHRFKNLGAQT | |
| | | | GELWNTFLKTAAPLAPVKAL | |
| | | | MPVFTLSPVIINTAPCLFSD | |
| | | | GSTSRAAYILWDKQILSQRS | |
| | | | FPLPPPHKSAQRAELLGLLH | |
| | | | GLSSARSWRCLNIFLDSKYL | |
| | | | YHYLRTLALGTFQGRSSQAP | |
| | | | FQALLPRLLSRKVVYLHHVR | |
| | | | SHTNLPDPISRLNALTDALL | |
| | | | ITPVLQLSPAELHSFTHCGQ | |
| | | | TALTLQGATTTEASNILRSC | |
| | | | HACRGGNPQHQMPRGHIRRG | |
| | | | LLPNHIWQGDITHFKYKNTL | |
| | | | YRLHVWVDTFSGAI | |
| | | | SATQKRKETSSEAISSLLQA | |
| | | | IAHLGKPSYINTDNGPAYIS | |
| | | | QDFLNMCTSLAIRHTTHVPY | |
| | | | NPTSSGLVERSNGILKTLLY | |
| | | | KYFTDKPDLPMDNALSIALW | |
| | | | TINHLNVLTNCHKTRWQLHH | |
| | | | SPRLQPIPETRSLSNKQTHW | |
| | | | YYFKLPGLNSRQWKGPQEAL | |
| | | | QEAAGAALIPVSASSAQWIP | |
| | | | WRLLKRAACPRPVGGPADPK | |
| | | | EKDLQHHG | |
| | | | (SEQ ID NO: 1572) | |
| POL_ | P14350 | Human | MNPLQLLQPLPAEIKGTKLL | IPR043502, |
| FOA | | spumaretrovirus | AHWDSGATITCIPESFLEDE | SSF56672, |
| MV- | | | QPIKKTLIKTIHGEKQQNVY | IPR000477, |
| residues | | | YVTFKVKGRKVEAEVIASPY | PF00078 |
| only | | | EYILLSPTDVPWLTQQPLQL | |
| | | | TILVPLQEYQEKILSKTALP | |
| | | | EDQKQQLKTLFVKYDNLWQH | |
| | | | WENQVGHRKIRPHNIATGDY | |
| | | | PPRPQKQYPINPKAKPSIQI | |
| | | | VIDDLLKQGVLTPQNSTMNT | |
| | | | PVYPVPKPDGRWRMVLDYRE | |
| | | | VNKTIPLTAAQNQHSAGILA | |
| | | | TIVRQKYKTTLDLANGFWAH | |
| | | | PITPESYWLTAFTWQGKQYC | |
| | | | WTRLPQGFLNSPALFTADVV | |
| | | | DLLKEIPNVQVYVDDIYLSH | |
| | | | DDPKEHVQQLEKVFQILLQA | |
| | | | GYVVSLKKSEIGQKTVEFLG | |
| | | | FNITKEGRGLTDTFKTKLLN | |
| | | | ITPPKDLKQLQSILGLLNFA | |
| | | | RNFIPNFAELVQPLYNLIAS | |
| | | | AKGKYIEWSEENTKQLNMVI | |
| | | | EALNTASNLEERLPEQRLVI | |
| | | | KVNTSPSAGYVRYYNETGKK | |
| | | | PIMYLNYVFSKAELKFSMLE | |
| | | | KLLTTMHKALIKAMDLAMGQ | |
| | | | EILVYSPIVSMTKIQKTPLP | |
| | | | ERKALPIRWITWMTYLEDPR | |
| | | | IQFHYDKTLPELKHIPDVYT | |
| | | | SSQSPVKHPSQYEGVFYTDG | |
| | | | SAIKSPDPTKSNNAGMGIVH | |
| | | | ATYKPEYQVLNQWSIPLGNH | |
| | | | TAQMAEIAAVEFACKKALKI | |
| | | | PGPVLVITDSFYVAESANKE | |
| | | | LPYWKSNGFVNNKKKPLKHI | |
| | | | SKWKSIAECLSMKPDITIQH | |
| | | | EKGISLQIPVFILKGNALAD | |
| | | | KLATQGSYVVNCNTKKPNLD | |
| | | | AELDQLLQGHYIKGYPKQYT | |
| | | | YFLEDGKVKVSRPEGVKIIP | |
| | | | PQSDRQKIVLQAHNLAHTGR | |
| | | | EATLLKIANLYWWPNMRKDV | |
| | | | VKQLGRCQQCLITNASNKAS | |
| | | | GPILRPDRPQKPFDKFFIDY | |
| | | | IGPLPPSQGYLYVLVVVDGM | |
| | | | TGFTWLYPTKAPSTSATVKS | |
| | | | LNVLTSIAIPKVIHSDQGAA | |
| | | | FTSSTFAEWAKERGIHLEFS | |
| | | | TPYHPQSGSKVERKNSDIKR | |
| | | | LLTKLLVGRPTKWYDLLPVV | |
| | | | QLALNNTYSPVLKYTPHQLL | |
| | | | FGIDSNTPFANQDTLDLTRE | |
| | | | EELSLLQEIRTSLYHPSTPP | |
| | | | ASSRSWSPVVGQLVQERVAR | |
| | | | PASLRPRWHKPSTVLKVLNP | |
| | | | RTVVILDHLGNNRTVSIDNL | |
| | | | KPTSHQNGTTNDTATMDHLE | |
| | | | KNE | |
| | | | (SEQ ID NO: 1573) | |
| POL_ | P03361 | Bovine | MGNSPSYNPPAGISPSDWLN | IPR043502, |
| BLVJ- | | leukemia | LLQSAQRLNPRPSPSDFTDL | SSF56672, |
| residues | | virus | KNYIHWFHKTQKKPWTFTSG | IPR000477, |
| only | | | GPTSCPPGRFGRVPLVLATL | PF00078 |
| | | | NEVLSNEGGAPGASAPEEQP | |
| | | | PPYDPPAILPIISEGNRNRH | |
| | | | RAWALRELQDIKKEIENKAP | |
| | | | GSQVWIQTLRLAILQADPTP | |
| | | | ADLEQLCQYIASPVDQTAHM | |
| | | | TSLTAAIAAAEAANTLQGFN | |
| | | | PKTGTLTQQSAQPNAGDLRS | |
| | | | QYQNLWLQAGKNLPTRPSAP | |
| | | | WSTIVQGPAESSVEFVNRLQ | |
| | | | ISLADNLPDGVPKEPIIDSL | |
| | | | SYANANRECQQILQGRGPVA | |
| | | | AVGQKLQACAQWAPKNKQPA | |
| | | | LLVHTPGPKMPGPRQPAPKR | |
| | | | PPPGPCYRCLKEGHWARDCP | |
| | | | TKATGPPPGPCPICKDPSHW | |
| | | | KRDCPTLKSKNKLIEGGLSA | |
| | | | PQTITPITDSLSEAELECLL | |
| | | | SIPLARSRPSVAVYLSGPWL | |
| | | | QPSQNQALMLVDTGAENTVL | |
| | | | PQNWLVRDYPRIPAAVLGAG | |
| | | | GVSRNRYNWLQGPLTLALKP | |
| | | | EGPFITIPKILVDTSDKWQI | |
| | | | LGRDVPSRLQASISIPEEVR | |
| | | | PPVVGVLDTPPSHIGLEHLP | |
| | | | PPPEVPQFPLNLERLQALQD | |
| | | | LVHRSLEAGYISPWDGPGNN | |
| | | | PVFPVRKPNGAWRFVHDLRA | |
| | | | TNALTKPIPALSPGPPDLTA | |
| | | | IPTHPPHIICLDLKDAFFQI | |
| | | | PVEDRFRFYLSFTLPSPGGL | |
| | | | QPHRRFAWRVLPQGFINSPA | |
| | | | LFERALQEPLRQVSAAFSQS | |
| | | | LLVSYMDDILYASPTEEQRS | |
| | | | QCYQALAARLRDLGFQVASE | |
| | | | KTSQTPSPVPFLGQMVHEQI | |
| | | | VTYQSLPTLQISSPISLHQL | |
| | | | QAVLGDLQWVSRGTPTTRRP | |
| | | | LQLLYSSLKRHHDPRAIIQL | |
| | | | SPEQLQGIAELRQALSHNAR | |
| | | | SRYNEQEPLLAYVHLTRAGS | |
| | | | TLVLFQKGAQFPLAYFQTPL | |
| | | | TDNQASPWGLLLLLGCQYLQ | |
| | | | TQALSSYAKPILKYYHNLPK | |
| | | | TSLDNWIQSSEDPRVQELLQ | |
| | | | LWPQISSQGIQPPGPWKTLI | |
| | | | TRAEVFLTPQFSPDPIPAAL | |
| | | | CLFSDGATGRGAYCLWKDHL | |
| | | | LDFQAVPAPESAQKGELAGL | |
| | | | LAGLAAAPPEPVNIWVDSKY | |
| | | | LYSLLRTLVLGAWLQPDPVP | |
| | | | SYALLYKSLLRHPAIVVGHV | |
| | | | RSHSSASHPIASLNNYVDQL | |
| | | | LPLETPEQWHKLTHCNSRAL | |
| | | | SRWPNPRISAWDPRSPATLC | |
| | | | ETCQKLNPTGGGKMRTIQRG | |
| | | | WAPNHIWQADITHYKYKQFT | |
| | | | YALHVFVDTYSGATHASAKR | |
| | | | GLTTQTTIEGLLEAIVHLGR | |
| | | | PKKLNTD | |
| | | | QGANYTSKTFVRFCQQFGVS | |
| | | | LSHHVPYNPTSSGLDERTNG | |
| | | | LLKLLLSKYHLDEPHLPMTQ | |
| | | | ALSRALWTHNQINLLPILKT | |
| | | | RWELHHSPPLAVISEGGETP | |
| | | | KGSDKLFLYLLPGQNNRRWL | |
| | | | GPLPALVEASGGALLATDPP | |
| | | | VWVPWRLLKAFKCLKNDGPE | |
| | | | DAHNRSSDG | |
| | | | (SEQ ID NO: 1574) | |
| O41894_ | O41894 | Bovine | MPALRPLQVEIKGNHLKGYW | IPR043502, |
| 9RE | | foamy | DSGAEITCVPAIYIIEEQPV | SSF56672, |
| TR- | | virus | GKKLITTIHNEKEHDVYYVE | IPR000477, |
| residues | | | MKIEKRKVQCEVIATALDYV | PF00078 |
| only | | | LVAPVDIPWYKPGPLELTIK | |
| | | | IDVESQKHTLITESTLSPQG | |
| | | | QMRLKKLLDQYQALWQCWEN | |
| | | | QVGHRRIEPHKIATGALKPR | |
| | | | PQKQYHINPRAKADIQIVID | |
| | | | DLLRQGVLRQQNSEMNTPVY | |
| | | | PVPKADGRWRMVLDYREVNK | |
| | | | VTPLVATQNCHSASILNTLY | |
| | | | RGPYKSTLDLANGFWAHPIK | |
| | | | PEDYWITAFTWGGKTYCWTV | |
| | | | LPQGFLNSPALFTADVVDIL | |
| | | | KDIPNVQVYVDDVYVSSATE | |
| | | | QEHLDILETIFNRLSTAGYI | |
| | | | VSLKKSKLAKETVEFLGFSI | |
| | | | SQNGRGLTDSYKQKLMDLQP | |
| | | | PTTLRQLQSILGLINFARNF | |
| | | | LPNFAELVAPLYQLIPKAKG | |
| | | | QCIPWTMDHTTQLKTIIQAL | |
| | | | NSTENLEERRPDVDLIMKVH | |
| | | | ISNTAGYIRFYNHGGQKPIA | |
| | | | YNNALFTSTELKFTPTEKIM | |
| | | | ATIHKGLLKALDLSLGKEIH | |
| | | | VYSAIASMTKLQKTPLSERK | |
| | | | ALSIRWLKWQTYFEDPRIKF | |
| | | | HHDATLPDLQNLPVPQQDTG | |
| | | | KEMTILPLLHYEAIFYTDGS | |
| | | | AIRSPKPNKTHSAGMGIIQA | |
| | | | KFEPDFRIVHLWSFPLGDHT | |
| | | | AQYAEIAAFEFAIRRATGIR | |
| | | | GPVLIVTDSNYVAKSYNEEL | |
| | | | PYWESNGFVNNKKKTLKHIS | |
| | | | KWKAIAECKNLKADIHVIHE | |
| | | | PGHQPAEASPHAQGNALADK | |
| | | | QAVSGSYKVFSNELKPSLDA | |
| | | | ELEQVLSTGRPNPQGYPNKY | |
| | | | EYKLVNGLCYVDRRGEEGLK | |
| | | | IIPPKADRVKLCQLAHDGPG | |
| | | | SAHLGRSALLLKLQQKYWWP | |
| | | | RMHIDASRIVLNCTVCAQTN | |
| | | | STNQKPRPPLVIPHDTKPFQ | |
| | | | VWYMDYIGPLPPSNGYQHAL | |
| | | | VIVDAGTGFTWIYPTKAQTA | |
| | | | NATVKALTHLTGTAVPKVLH | |
| | | | SDQGPAFTSSILADWAKDRG | |
| | | | IQLEHSAPYHPQSSGKVERK | |
| | | | NSEIKRLLTKLLAGRPTKWY | |
| | | | PLIPIVQLALNNTPNTRQKY | |
| | | | TPHQLMYGADCNLPFENLDT | |
| | | | LDLTREEQLAVLKEVRDGLL | |
| | | | DLYPSPSQTTARSWTPSPGL | |
| | | | LVQERVARPAQLRPKWRKPT | |
| | | | PIKKVLNERTVIIDHLGQDK | |
| | | | VVSIDNLKPAAHQKLAQTPD | |
| | | | SAEICPSATPCPPNTSLWYD | |
| | | | LDTGTWTCQRCGYQCPDKYH | |
| | | | QPQCTWSCEDRCGHRWKECG | |
| | | | NCIPQDGSSDDASAVAAVEI | |
| | | | (SEQ ID NO: 1575) | |

TABLE 31
Exemplary dimeric retroviral reverse
transcriptases and their RT domain signatures

| | | | | RT |
|---|---|---|---|---|
| Name | Accession | Organism | Sequence | Signatures |
| Q83133_ | Q83133 | Avian | RATVLTVALHLAIPLKWKPNHTPVWID | IPR043502, |
| AVIMA | | myelo- | QWPLPEGKLVALTQLVEKELQLGHIEP | SSF56672, |
| | | blastosis- | SLSCWNTPVFVIRKASGSYRLLHDLRA | IPR000477, |
| | | associated | VNAKLVPFGAVQQGAPVLSALPRGWPL | PF00078, |
| | | virus type | MVLDLKDCFFSIPLAEQDREAFAFTLP | cd01645, |
| | | 1 | SVNNQAPARRFQWKVLPQGMTCSPTIC | PF06817, |
| | | | QLIVGQILEPLRLKHPSLRMLHYMDDL | IPR010661 |
| | | | LLAASSHDGLEAAGEEVISTLERAGFT | |
| | | | ISPDKVQREPGVQYLGYKLGSTYVAPV | |
| | | | GLVAEPRIATLWDVQKLVGSLQSVRPA | |
| | | | LGIPPRLMGPFYEQLRGSDPNEAREWN | |
| | | | LDMKMAWREIVQLSTTAALERWDPALP | |
| | | | LEGAVARCEQGAIGVLGQGLSTHPRPC | |
| | | | LWLFSTQPTKAFTAWLEVLTLLITKLR | |
| | | | ASAVRTFGKEVDILLLPACFREDLPLP | |
| | | | EGILLALRGFAGKIRSSDTPSIFDIAR | |
| | | | PLHVSLKVRVTDHPVPGPTVFTDASSS | |
| | | | THKGVVVWREGPRWEIKEIADLGASVQ | |
| | | | QLEARAVAMALLLWPTTPTNVVTDSAF | |
| | | | VAKMLLKMGQEGVPSTAAAFILEDALS | |
| | | | QRSAMAAVLHVRSHSEVPGFFTEGNDV | |
| | | | ADSQATFQAYPLREAKDLHTALHIGPR | |
| | | | ALSKACNISMQQAREVVQTCPHCNSAP | |
| | | | ALEAGVNPRGLGPLQIWQTDFTLEPRM | |
| | | | APRSWLAVTVDTASSAIVVTQHGRVTS | |
| | | | VAAQHHWATAIAVLGRPKAIKTDNGSC | |
| | | | FTSKSTREWLARWGIAHTTGIPGNSQG | |
| | | | QAMVERANRLLKDKIRVLAEGDGFMKR | |
| | | | IPTSKQGELLAKAMYALNHFERGENTK | |
| | | | TPIQKHWRPTVLTEGPPVKIRIETGEW | |
| | | | EKGWNVLVWGRGYAAVKNRDTDKVIWV | |
| | | | PSRKVKPDITQKDEVTKKDEASPLFAG | |
| | | | ISDWAPWEGEQEGLQEETASNKQERPG | |
| | | | EDTPAANES (SEQ ID NO: 1576) | |
| POL_ | P05896 | Simian | MGARNSVLSGKKADELEKIRLRPGGKK | IPR043502, |
| SIVM1 | | immuno- | KYMLKHVVWAANELDRFGLAESLLENK | SSF56672, |
| | | deficiency | EGCQKILSVLAPLVPTGSENLKSLYNT | IPR000477, |
| | | virus | VCVIWCIHAEEKVKHTEEAKQIVQRHL | PF00078, |
| | | | VMETGTAETMPKTSRPTAPFSGRGGNY | PF06817, |
| | | | PVQQIGGNYTHLPLSPRTLNAWVKLIE | IPR010661, |
| | | | EKKFGAEVVSGFQALSEGCLPYDINQM | PF06815, |
| | | | LNCVGDHQAAMQIIRDIINEEAADWDL | IPR010659 |
| | | | QHPQQAPQQGQLREPSGSDIAGTTSTV | |
| | | | EEQIQWMYRQQNPIPVGNIYRRWIQLG | |
| | | | LQKCVRMYNPTNILDVKQGPKEPFQSY | |
| | | | VDRFYKSLRAEQTDPAVKNWMTQTLLI | |
| | | | QNANPDCKLVLKGLGTNPTLEEMLTAC | |
| | | | QGVGGPGQKARLMAEALKEALAPAPIP | |
| | | | FAAAQQKGPRKPIKCWNCGKEGHSARQ | |
| | | | CRAPRRQGCWKCGKMDHVMAKCPNRQA | |
| | | | GFFRPWPLGKEAPQFPHGSSASGADAN | |
| | | | CSPRRTSCGSAKELHALGQAAERKQRE | |
| | | | ALQGGDRGFAAPQFSLWRRPVVTAHIE | |
| | | | GQPVEVLLDTGADDSIVTGIELGPHYT | |
| | | | PKIVGGIGGFINTKEYKNVEIEVLGKR | |
| | | | IKGTIMTGDTPINIFGRNLLTALGMSL | |
| | | | NLPIAKVEPVKSPLKPGKDGPKLKQWP | |
| | | | LSKEKIVALREICEKMEKDGQLEEAPP | |
| | | | TNPYNTPTFAIKKKDKNKWRMLIDFRE | |
| | | | LNRVTQDFTEVQLGIPHPAGLAKRKRI | |
| | | | TVLDIGDAYFSIPLDEEFRQYTAFTLP | |
| | | | SVNNAEPGKRYIYKVLPQGWKGSPAIF | |
| | | | QYTMRHVLEPFRKANPDVTLVQYMDDI | |
| | | | LIASDRTDLEHDRVVLQLKELLNSIGF | |
| | | | SSPEEKFQKDPPFQWMGYELWPTKWKL | |
| | | | QKIELPQRETWTVNDIQKLVGVLNWAA | |
| | | | QIYPGIKTKHLCRLIRGKMTLTEEVQW | |
| | | | TEMAEAEYEENKIILSQEQEGCYYQES | |
| | | | KPLEATVIKSQDNQWSYKIHQEDKILK | |
| | | | VGKFAKIKNTHTNGVRLLAHVIQKIGK | |
| | | | EAIVIWGQVPKFHLPVEKDVWEQWWTD | |
| | | | YWQVTWIPEWDFISTPPLVRLVFNLVK | |
| | | | DPIEGEETYYVDGSCSKQSKEGKAGYI | |
| | | | TDRGKDKVKVLEQTTNQQAELEAFLMA | |
| | | | LTDSGPKANIIVDSQYVMGIITGCPTE | |
| | | | SESRLVNQIIEEMIKKTEIYVAWVPAH | |
| | | | KGIGGNQEIDHLVSQGIRQVLFLEKIE | |
| | | | PAQEEHSKYHSNIKELVFKFGLPRLVA | |
| | | | KQIVDTCDKCHQKGEAIHGQVNSDLGT | |
| | | | WQMDCTHLEGKIVIVAVHVASGFIEAE | |
| | | | VIPQETGRQTALFLLKLASRWPITHLH | |
| | | | TDNGANFASQEVKMVAWWAGIEHTFGV | |
| | | | PYNPQSQGVVEAMNHHLKNQIDRIREQ | |
| | | | ANSVETIVLMAVHCMNFKRRGGIGDMT | |
| | | | PAERLINMITTEQEIQFQQSKNSKFKN | |
| | | | FRVYYREGRDQLWKGPGELLWKGEGAV | |
| | | | ILKVGTDIKVVPRRKAKIIKDYGGGKE | |
| | | | MDSSSHMEDTGEAREVA (SEQ ID | |
| | | | NO: 1577) | |
| POL_ | P03354 | Roussarcoma | MEAVIKVISSACKTYCGKTSPSKKEIG | IPR043502, |
| RSVP | | virus | AMLSLLQKEGLLMSPSDLYSPGSWDPI | SSF56672, |
| | | | TAALSQRAMILGKSGELKTWGLVLGAL | IPR000477, |
| | | | KAAREEQVTSEQAKFWLGLGGGRVSPP | PF00078, |
| | | | GPECIEKPATERRIDKGEEVGETTVQR | cd01645, |
| | | | DAKMAPEETATPKTVGTSCYHCGTAIG | PF06817, |
| | | | CNCATASAPPPPYVGSGLYPSLAGVGE | IPR010661 |
| | | | QQGQGGDTPPGAEQSRAEPGHAGQAPG | |
| | | | PALTDWARVREELASTGPPVVAMPVVI | |
| | | | KTEGPAWTPLEPKLITRLADTVRTKGL | |
| | | | RSPITMAEVEALMSSPLLPHDVTNLMR | |
| | | | VILGPAPYALWMDAWGVQLQTVIAAAT | |
| | | | RDPRHPANGQGRGERTNLNRLKGLADG | |
| | | | MVGNPQGQAALLRPGELVAITASALQA | |
| | | | FREVARLAEPAGPWADIMQGPSESFVD | |
| | | | FANRLIKAVEGSDLPPSARAPVIIDCF | |
| | | | RQKSQPDIQQLIRTAPSTLTTPGEIIK | |
| | | | YVLDRQKTAPLTDQGIAAAMSSAIQPL | |
| | | | IMAVVNRERDGQTGSGGRARGLCYTCG | |
| | | | SPGHYQAQCPKKRKSGNSRERCQLCNG | |
| | | | MGHNAKQCRKRDGNQGQRPGKGLSSGP | |
| | | | WPGPEPPAVSLAMTMEHKDRPLVRVIL | |
| | | | TNTGSHPVKQRSVYITALLDSGADITI | |
| | | | ISEEDWPTDWPVMEAANPQIHGIGGGI | |
| | | | PMRKSRDMIELGVINRDGSLERPLLLF | |
| | | | PAVAMVRGSILGRDCLQGLGLRLTNLI | |
| | | | GRATVLTVALHLAIPLKWKPDHTPVWI | |
| | | | DQWPLPEGKLVALTQLVEKELQLGHIE | |
| | | | PSLSCWNTPVFVIRKASGSYRLLHDLR | |
| | | | AVNAKLVPFGAVQQGAPVLSALPRGWP | |
| | | | LMVLDLKDCFFSIPLAEQDREAFAFTL | |
| | | | PSVNNQAPARRFQWKVLPQGMTCSPTI | |
| | | | CQLVVGQVLEPLRLKHPSLCMLHYMDD | |
| | | | LLLAASSHDGLEAAGEEVISTLERAGF | |
| | | | TISPDKVQREPGVQYLGYKLGSTYVAP | |
| | | | VGLVAEPRIATLWDVQKLVGSLQWLRP | |
| | | | ALGIPPRLMGPFYEQLRGSDPNEAREW | |
| | | | NLDMKMAWREIVRLSTTAALERWDPAL | |
| | | | PLEGAVARCEQGAIGVLGQGLSTHPRP | |
| | | | CLWLFSTQPTKAFTAWLEVLTLLITKL | |
| | | | RASAVRTFGKEVDILLLPACFREDLPL | |
| | | | PEGILLALKGFAGKIRSSDTPSIFDIA | |
| | | | RPLHVSLKVRVTDHPVPGPTVFTDASS | |
| | | | STHKGVVVWREGPRWEIKEIADLGASV | |
| | | | QQLEARAVAMALLLWPTTPTNVVTDSA | |
| | | | FVAKMLLKMGQEGVPSTAAAFILEDAL | |
| | | | SQRSAMAAVLHVRSHSEVPGFFTEGND | |
| | | | VADSQATFQAYPLREAKDLHTALHIGP | |
| | | | RALSKACNISMQQAREVVQTCPHCNSA | |
| | | | PALEAGVNPRGLGPLQIWQTDFTLEPR | |
| | | | MAPRSWLAVTVDTASSAIVVTQHGRVT | |
| | | | SVAVQHHWATAIAVLGRPKAIKTDNGS | |
| | | | CFTSKSTREWLARWGIAHTTGIPGNSQ | |
| | | | GQAMVERANRLLKDRIRVLAEGDGFMK | |
| | | | RIPTSKQGELLAKAMYALNHFERGENT | |
| | | | KTPIQKHWRPTVLTEGPPVKIRIETGE | |
| | | | WEKGWNVLVWGRGYAAVKNRDTDKVIW | |
| | | | VPSRKVKPDITQKDEVTKKDEASPLFA | |
| | | | GISDWIPWEDEQEGLQGETASNKQERP | |
| | | | GEDTLAANES (SEQ ID NO: | |
| | | | 1578) | |
| POL_ | P15833 | Human | MGARGSVLSGKKTDELEKVRLRPGGKK | IPR043502, |
| HV2D2 | | immuno- | KYMLKHVVWAVNELDRFGLAESLLESK | SSF56672, |
| | | deficiency | EGCQKILKVLAPLVPTGSENLKSLFNI | IPR000477, |
| | | virus type | VCVIFCLHAEEKVKDTEEAKKIAQRHL | PF00078, |
| | | 2 | AADTEKMPATNKPTAPPSGGNYPVQQL | PF06817, |
| | | | AGNYVHLPLSPRTLNAWVKLVEEKKFG | IPR010661, |
| | | | AEVVPGFQALSEGCTPYDINQMLNCVG | PF06815, |
| | | | EHQAAMQIIREIINEEAADWDQQHPSP | IPR010659 |
| | | | GPMPAGQLRDPRGSDIAGTTSTVEEQI | |
| | | | QWMYRAQNPVPVGNIYRRWIQLGLQKC | |
| | | | VRMYNPTNILDIKQGPKEPFQSYVDRF | |
| | | | YKSLRAEQTDPAVKNWMTQTLLIQNAN | |
| | | | PDCKLVLKGLGMNPTLEEMLTACQGIG | |
| | | | GPGQKARLMAEALKEALTPAPIPFAAV | |
| | | | QQKAGKRGTVTCWNCGKQGHTARQCRA | |
| | | | PRRQGCWKCGKTGHIMSKCPERQAGFL | |
| | | | RVRTLGKEASQLPHDPSASGSDTICTP | |
| | | | DEPSRGHDTSGGDTICAPCRSSSGDAE | |
| | | | KLHADGETTEREPRETLQGGDRGFAAP | |
| | | | QFSLWRRPVVKACIEGQSVEVLLDTGV | |
| | | | DDSIVAGIELGSNYTPKIVGGIGGFIN | |
| | | | TKEYKDVEIEVVGKRVRATIMTGDTPI | |
| | | | NIFGRNILNTLGMTLNFPVAKVEPVKV | |
| | | | ELKPGKDGPKIRQWPLSREKILALKEI | |
| | | | CEKMEKEGQLEEAPPTNPYNTPTFAIK | |
| | | | KKDKNKWRMLIDFRELNKVTQDFTEVN | |
| | | | WVFPTRQVAEKRRITVIDVGDAYFSIP | |
| | | | LDPNFRQYTAFTLPSVNNAEPGKRYIY | |
| | | | KVLPQGWKGSQSICQYSMRKVLDPFRK | |
| | | | ANSDVIIIQYMDDILIASDRSDLEHDR | |
| | | | VVSQLKELLNDMGFSTPEEKFQKDPPF | |
| | | | KWMGYELWPKKWKLQKIQLPEKEVWTV | |
| | | | NAIQKLVGVLNWAAQLFPGIKTRHICK | |
| | | | LIRGKMTLTEEVQWTELAEAELQENKI | |
| | | | ILEQEQEGSYYKERVPLEATVQKNLAN | |
| | | | QWTYKIHQGNKVLKVGKYAKVKNTHTN | |
| | | | GVRLLAHVVQKIGKEALVIWGEIPVFH | |
| | | | LPVERETWDQWWTDYWQVTWIPEWDFV | |
| | | | STPPLIRLAYNLVKDPLEGRETYYTDG | |
| | | | SCNRTSKEGKAGYVTDRGKDKVKVLEQ | |
| | | | TTNQQAELEAFALALTDSEPQVNIIVD | |
| | | | SQYVMGIIAAQPTETESPIVAKIIEEM | |
| | | | IKKEAVYVGWVPAHKGLGGNQEVDHLV | |
| | | | SQGIRQVLFLEKIEPAQEEHEKYHGNV | |
| | | | KELVHKFGIPQLVAKQIVNSCDKCQQK | |
| | | | GEAIHGQVNADLGTWQMDCTHLEGKII | |
| | | | IVAVHVASGFIEAEVIPQETGRQTALF | |
| | | | LLKLASRWPITHLHTDNGANFTSPSVK | |
| | | | MVAWWVGIEQTFGVPYNPQSQGVVEAM | |
| | | | NHHLKNQIDRLRDQAVSIETVVLMATH | |
| | | | CMNFKRRGGIGDMTPAERLVNMITTEQ | |
| | | | EIQFFQAKNLKFQNFQVYYREGRDQLW | |
| | | | KGPGELLWKGEGAVIIKVGTEIKVVPR | |
| | | | RKAKIIRHYGGGKGLDCSADMEDTRQA | |
| | | | REMAQSD (SEQ ID NO: 1579) | |
| POL_ | P03369 | Human | MGARASVLSGGELDKWEKIRLRPGGKK | IPR043502, |
| HV1A2 | | immuno- | KYKLKHIVWASRELERFAVNPGLLETS | SSF56672, |
| | | deficiency | EGCRQILGQLQPSLQTGSEELRSLYNT | IPR000477, |
| | | virus type | VATLYCVHQRIDVKDTKEALEKIEEEQ | PF00078, |
| | | 1 | NKSKKKAQQAAAAAGTGNSSQVSQNYP | cd01645, |
| | | | IVQNLQGQMVHQAISPRTLNAWVKVVE | PF06817, |
| | | | EKAFSPEVIPMFSALSEGATPQDLNTM | IPR010661, |
| | | | LNTVGGHQAAMQMLKETINEEAAEWDR | PF06815, |
| | | | VHPVHAGPIAPGQMREPRGSDIAGTTS | IPR010659 |
| | | | TLQEQIGWMTNNPPIPVGEIYKRWIIL | |
| | | | GLNKIVRMYSPTSILDIRQGPKEPFRD | |
| | | | YVDRFYKTLRAEQASQDVKNWMTETLL | |
| | | | VQNANPDCKTILKALGPAATLEEMMTA | |
| | | | CQGVGGPGHKARVLAEAMSQVTNPANI | |
| | | | MMQRGNFRNQRKTVKCFNCGKEGHIAK | |
| | | | NCRAPRKKGCWRCGREGHQMKDCTERQ | |
| | | | ANFLREDLAFLQGKAREFSSEQTRANS | |
| | | | PTRRELQVWGGENNSLSEAGADRQGTV | |
| | | | SFNFPQITLWQRPLVTIRIGGQLKEAL | |
| | | | LDTGADDTVLEEMNLPGKWKPKMIGGI | |
| | | | GGFIKVRQYDQIPVEICGHKAIGTVLV | |
| | | | GPTPVNIIGRNLLTQIGCTLNFPISPI | |
| | | | ETVPVKLKPGMDGPKVKQWPLTEEKIK | |
| | | | ALVEICTEMEKEGKISKIGPENPYNTP | |
| | | | VFAIKKKDSTKWRKLVDFRELNKRTQD | |
| | | | FWEVQLGIPHPAGLKKKKSVTVLDVGD | |
| | | | AYFSVPLDKDFRKYTAFTIPSINNETP | |
| | | | GIRYQYNVLPQGWKGSPAIFQSSMTKI | |
| | | | LEPFRKQNPDIVIYQYMDDLYVGSDLE | |
| | | | IGQHRTKIEELRQHLLRWGFTTPDKKH | |
| | | | QKEPPFLWMGYELHPDKWTVQPIMLPE | |
| | | | KDSWTVNDIQKLVGKLNWASQIYAGIK | |
| | | | VKQLCKLLRGTKALTEVIPLTEEAELE | |
| | | | LAENREILKEPVHEVYYDPSKDLVAEI | |
| | | | QKQGQGQWTYQIYQEPFKNLKTGKYAR | |
| | | | MRGAHTNDVKQLTEAVQKVSTESIVIW | |
| | | | GKIPKFKLPIQKETWEAWWMEYWQATW | |
| | | | IPEWEFVNTPPLVKLWYQLEKEPIVGA | |
| | | | ETFYVDGAANRETKLGKAGYVTDRGRQ | |
| | | | KVVSIADTTNQKTELQAIHLALQDSGL | |
| | | | EVNIVTDSQYALGIIQAQPDKSESELV | |
| | | | SQIIEQLIKKEKVYLAWVPAHKGIGGN | |
| | | | EQVDKLVSAGIRKVLFLNGIDKAQEEH | |
| | | | EKYHSNWRAMASDFNLPPVVAKEIVAS | |
| | | | CDKCQLKGEAMHGQVDCSPGIWQLDCT | |
| | | | HLEGKIILVAVHVASGYIEAEVIPAET | |
| | | | GQETAYFLLKLAGRWPVKTIHTDNGSN | |
| | | | FTSTTVKAACWWAGIKQEFGIPYNPQS | |
| | | | QGVVESMNNELKKIIGQVRDQAEHLKT | |
| | | | AVQMAVFIHNFKRKGGIGGYSAGERIV | |
| | | | DIIATDIQTKELQKQITKIQNFRVYYR | |
| | | | DNKDPLWKGPAKLLWKGEGAVVIQDNS | |
| | | | DIKVVPRRKAKIIRDYGKQMAGDDCVA | |
| | | | SRQDED (SEQ ID NO: 1580) | |
| POL_ | P16088 | Feline | KEFGKLEGGASCSPSESNAASSNAICT | IPR043502, |
| FIVPE | | immuno- | SNGGETIGFVNYNKVGTTTTLEKRPEI | SSF56672, |
| | | deficiency | LIFVNGYPIKFLLDTGADITILNRRDF | IPR000477, |
| | | virus | QVKNSIENGRQNMIGVGGGKRGTNYIN | PF00078, |
| | | | VHLEIRDENYKTQCIFGNVCVLEDNSL | PF06817, |
| | | | IQPLLGRDNMIKFNIRLVMAQISDKIP | IPR010661, |
| | | | VVKVKMKDPNKGPQIKQWPLTNEKIEA | PF06815, |
| | | | LTEIVERLEKEGKVKRADSNNPWNTPV | IPR010659 |
| | | | FAIKKKSGKWRMLIDFRELNKLTEKGA | |
| | | | EVQLGLPHPAGLQIKKQVTVLDIGDAY | |
| | | | FTIPLDPDYAPYTAFTLPRKNNAGPGR | |
| | | | RFVWCSLPQGWILSPLIYQSTLDNIIQ | |
| | | | PFIRQNPQLDIYQYMDDIYIGSNLSKK | |
| | | | EHKEKVEELRKLLLWWGFETPEDKLQE | |
| | | | EPPYTWMGYELHPLTWTIQQKQLDIPE | |
| | | | QPTLNELQKLAGKINWASQAIPDLSIK | |
| | | | ALTNMMRGNQNLNSTRQWTKEARLEVQ | |
| | | | KAKKAIEEQVQLGYYDPSKELYAKLSL | |
| | | | VGPHQISYQVYQKDPEKILWYGKMSRQ | |
| | | | KKKAENTCDIALRACYKIREESIIRIG | |
| | | | KEPRYEIPTSREAWESNLINSPYLKAP | |
| | | | PPEVEYIHAALNIKRALSMIKDAPIPG | |
| | | | AETWYIDGGRKLGKAAKAAYWTDTGKW | |
| | | | RVMDLEGSNQKAEIQALLLALKAGSEE | |
| | | | MNIITDSQYVINIILQQPDMMEGIWQE | |
| | | | VLEELEKKTAIFIDWVPGHKGIPGNEE | |
| | | | VDKLCQTMMIIEGDGILDKRSEDAGYD | |
| | | | LLAAKEIHLLPGEVKVIPTGVKLMLPK | |
| | | | GYWGLIIGKSSIGSKGLDVLGGVIDEG | |
| | | | YRGEIGVIMINVSRKSITLMERQKIAQ | |
| | | | LIILPCKHEVLEQGKVVMDSERGDNGY | |
| | | | GSTGVFSSWVDRIEEAEINHEKFHSDP | |
| | | | QYLRTEFNLPKMVAEEIRRKCPVCRII | |
| | | | GEQVGGQLKIGPGIWQMDCTHFDGKII | |
| | | | LVGIHVESGYIWAQIISQETADCTVKA | |
| | | | VLQLLSAHNVTELQTDNGPNFKNQKME | |
| | | | GVLNYMGVKHKFGIPGNPQSQALVENV | |
| | | | NHTLKVWIQKFLPETTSLDNALSLAVH | |
| | | | SLNFKRRGRIGGMAPYELLAQQESLRI | |
| | | | QDYFSAIPQKLQAQWIYYKDQKDKKWK | |
| | | | GPMRVEYWGQGSVLLKDEEKGYFLIPR | |
| | | | RHIRRVPEPCALPEGDE (SEQ ID | |
| | | | NO: 1581) | |
| POL_ | P03371 | Equine | TAWTFLKAMQKCSKKREARGSREAPET | IPR043502, |
| EIAVY | | infectious | NFPDTTEESAQQICCTRDSSDSKSVPR | SSF56672, |
| | | anemia | SERNKKGIQCQGEGSSRGSQPGQFVGV | IPR000477, |
| | | virus | TYNLEKRPTTIVLINDTPLNVLLDTGA | PF00078, |
| | | | DTSVLTTAHYNRLKYRGRKYQGTGIIG | PF06817, |
| | | | VGGNVETFSTPVTIKKKGRHIKTRMLV | IPR010661, |
| | | | ADIPVTILGRDILQDLGAKLVLAQLSK | PF06815, |
| | | | EIKFRKIELKEGTMGPKIPQWPLTKEK | IPR010659 |
| | | | LEGAKETVQRLLSEGKISEASDNNPYN | |
| | | | SPIFVIKKRSGKWRLLQDLRELNKTVQ | |
| | | | VGTEISRGLPHPGGLIKCKHMTVLDIG | |
| | | | DAYFTIPLDPEFRPYTAFTIPSINHQE | |
| | | | PDKRYVWKCLPQGFVLSPYIYQKTLQE | |
| | | | ILQPFRERYPEVQLYQYMDDLFVGSNG | |
| | | | SKKQHKELIIELRAILQKGFETPDDKL | |
| | | | QEVPPYSWLGYQLCPENWKVQKMQLDM | |
| | | | VKNPTLNDVQKLMGNITWMSSGVPGLT | |
| | | | VKHIAATTKGCLELNQKVIWTEEAQKE | |
| | | | LEENNEKIKNAQGLQYYNPEEEMLCEV | |
| | | | EITKNYEATYVIKQSQGILWAGKKIMK | |
| | | | ANKGWSTVKNLMLLLQHVATESITRVG | |
| | | | KCPTFKVPFTKEQVMWEMQKGWYYSWL | |
| | | | PEIVYTHQVVHDDWRMKLVEEPTSGIT | |
| | | | IYTDGGKQNGEGIAAYVTSNGRTKQKR | |
| | | | LGPVTHQVAERMAIQMALEDTRDKQVN | |
| | | | IVTDSYYCWKNITEGLGLEGPQNPWWP | |
| | | | IIQNIREKEIVYFAWVPGHKGIYGNQL | |
| | | | ADEAAKIKEEIMLAYQGTQIKEKRDED | |
| | | | AGFDLCVPYDIMIPVSDTKIIPTDVKI | |
| | | | QVPPNSFGWVTGKSSMAKQGLLINGGI | |
| | | | IDEGYTGEIQVICTNIGKSNIKLIEGQ | |
| | | | KFAQLIILQHHSNSRQPWDENKISQRG | |
| | | | DKGFGSTGVFWVENIQEAQDEHENWHT | |
| | | | SPKILARNYKIPLTVAKQITQECPHCT | |
| | | | KQGSGPAGCVMRSPNHWQADCTHLDNK | |
| | | | IILHFVESNSGYIHATLLSKENALCTS | |
| | | | LAILEWARLFSPKSLHTDNGTNFVAEP | |
| | | | VVNLLKFLKIAHTTGIPYHPESQGIVE | |
| | | | RANRTLKEKIQSHRDNTQTLEAALQLA | |
| | | | LITCNKGRESMGGQTPWEVFITNQAQV | |
| | | | IHEKLLLQQAQSSKKFCFYKIPGEHDW | |
| | | | KGPTRVLWKGDGAVVVNDEGKGIIAVP | |
| | | | LTRTKLLIKPN (SEQ ID NO: | |
| | | | 1582) | |
| POL_ | P19560 | Bovine | MKRRELEKKLRKVRVTPQQDKYYTIGN | IPR043502, |
| BIV29 | | immuno- | LQWAIRMINLMGIKCVCDEECSAAEVA | SSF56672, |
| | | deficiency | LIITQFSALDLENSPIRGKEEVAIKNT | IPR000477, |
| | | virus | LKVFWSLLAGYKPESTETALGYWEAFT | PF00078, |
| | | | YREREARADKEGEIKSIYPSLTQNTQN | PF06817, |
| | | | KKQTSNQTNTQSLPAITTQDGTPRFDP | IPR010661 |
| | | | DLMKQLKIWSDATERNGVDLHAVNILG | |
| | | | VITANLVQEEIKLLLNSTPKWRLDVQL | |
| | | | IESKVREKENAHRTWKQHHPEAPKTDE | |
| | | | IIGKGLSSAEQATLISVECRETFRQWV | |
| | | | LQAAMEVAQAKHATPGPINIHQGPKEP | |
| | | | YTDFINRLVAALEGMAAPETTKEYLLQ | |
| | | | HLSIDHANEDCQSILRPLGPNTPMEKK | |
| | | | LEACRVVGSQKSKMQFLVAAMKEMGIQ | |
| | | | SPIPAVLPHTPEAYASQTSGPEDGRRC | |
| | | | YGCGKTGHLKRNCKQQKCYHCGKPGHQ | |
| | | | ARNCRSKNREVLLCPLWAEEPTTEQFS | |
| | | | PEQHEFCDPICTPSYIRLDKQPFIKVF | |
| | | | IGGRWVKGLVDTGADEVVLKNIHWDRI | |
| | | | KGYPGTPIKQIGVNGVNVAKRKTHVEW | |
| | | | RFKDKTGIIDVLFSDTPVNLFGRSLLR | |
| | | | SIVTCFTLLVHTEKIEPLPVKVRGPGP | |
| | | | KVPQWPLTKEKYQALKEIVKDLLAEGK | |
| | | | ISEAAWDNPYNTPVFVIKKKGTGRWRM | |
| | | | LMDFRELNKITVKGQEFSTGLPYPPGI | |
| | | | KECEHLTAIDIKDAYFTIPLHEDFRPF | |
| | | | TAFSVVPVNREGPIERFQWNVLPQGWV | |
| | | | CSPAIYQTTTQKIIENIKKSHPDVMLY | |
| | | | QYMDDLLIGSNRDDHKQIVQEIRDKLG | |
| | | | SYGFKTPDEKVQEERVKWIGFELTPKK | |
| | | | WRFQPRQLKIKNPLTVNELQQLVGNCV | |
| | | | WVQPEVKIPLYPLTDLLRDKTNLQEKI | |
| | | | QLTPEAIKCVEEFNLKLKDPEWKDRIR | |
| | | | EGAELVIKIQMVPRGIVFDLLQDGNPI | |
| | | | WGGVKGLNYDHSNKIKKILRTMNELNR | |
| | | | TVVIMTGREASFLLPGSSEDWEAALQK | |
| | | | EESLTQIFPVKFYRHSCRWTSICGPVR | |
| | | | ENLTTYYTDGGKKGKTAAAVYWCEGRT | |
| | | | KSKVFPGTNQQAELKAICMALLDGPPK | |
| | | | MNIITDSRYAYEGMREEPETWAREGIW | |
| | | | LEIAKILPFKQYVGVGWVPAHKGIGGN | |
| | | | TEADEGVKKALEQMAPCSPPEAILLKP | |
| | | | GEKQNLETGIYMQGLRPQSFLPRADLP | |
| | | | VAITGTMVDSELQLQLLNIGTEHIRIQ | |
| | | | KDEVFMTCFLENIPSATEDHERWHTSP | |
| | | | DILVRQFHLPKRIAKEIVARCQECKRT | |
| | | | TTSPVRGTNPRGRFLWQMDNTHWNKTI | |
| | | | IWVAVETNSGLVEAQVIPEETALQVAL | |
| | | | CILQLIQRYTVLHLHSDNGPCFTAHRI | |
| | | | ENLCKYLGITKTTGIPYNPQSQGVVER | |
| | | | AHRDLKDRLAAYQGDCETVEAALSLAL | |
| | | | VSLNKKRGGIGGHTPYEIYLESEHTKY | |
| | | | QDQLEQQFSKQKIEKWCYVRNRRKEWK | |
| | | | GPYKVLWDGDGAAVIEEEGKTALYPHR | |
| | | | HMRFIPPPDSDIQDGSS (SEQ ID | |
| | | | NO: 1583) | |
| A0A142BKH1_ | A0A142BKH1 | Avian | TVALHLAIPLKWKPDHTPVWIDQWPLP | IPR043502, |
| ALV | | leukosis | EGKLVALTQLVEKELQLGHIEPSLSCW | SSF56672, |
| | | and | NTPVFVIRKASGSYRLLHDLRAVNAKL | IPR000477, |
| | | sarcoma | VPFGAVQQGAPVLSALPRGWPLMVLDL | PF00078, |
| | | virus | KDCFFSIPLAEQDREAFAFTLPSVNNQ | cd01645, |
| | | | APARRFQWKVLPQGMTCSPTICQLVVG | PF06817, |
| | | | QVLEPLRLKHPSLRMLHYMDDLLLAAS | IPR010661 |
| | | | SHDGLEAAGEEVISTLERAGFTISPDK | |
| | | | IQREPGVQYLGYKLGSTYVAPVGLVAE | |
| | | | PRIATLWDVQKLVGSLQWLRPALGIPP | |
| | | | RLMGPFYEQLRGSDPNEAREWNLDMKM | |
| | | | AWREIVQLSTTAALERWDPALPLEGAV | |
| | | | ARCEQGAIGVLGQGLSTHPRPCLWLFS | |
| | | | TQPTKAFTAWLEVLTLLITKLRASAVR | |
| | | | TFGKEVDVLLLPACFREDLPLPEGILL | |
| | | | ALRGFAGKIRSSDTPSIFDIARPLHVS | |
| | | | LKVRVTDHPVPGPTVFTDASSSTHKGV | |
| | | | VVWREGPRWEIKEIADLGASVQQLEAR | |
| | | | AVAMALLLWPTTPTNVVTDSAFVAKML | |
| | | | LKMGQEGVPSTAAAFILEDALSQRSAM | |
| | | | AAVLHVRSHSEVPGFFTEGNDVADSQA | |
| | | | TFQAYPLREAKDLHTALHIGPRALSKA | |
| | | | CNISMQQAREVVQTCPHCNSAPALEAG | |
| | | | VNPRGLGPLQIWQTDFTLEPRMAPRSW | |
| | | | LAVTVATASSAIVVTQHGRVTSVAARH | |
| | | | HWATAIAVLGRPKAIKTDNGSCFTSKS | |
| | | | TREWLARWGIAHTTGIPGNSQGQAMVE | |
| | | | RANRLLKDKIRVLAEGDGFMKRIPTGK | |
| | | | QGELLAKAMYALNHFERGENTKTPIQK | |
| | | | HWRPTVLTEGPPVKIRIETGEWEKGWN | |
| | | | VLVWGRGYAAVKNRDTDKIIWVPSRKV | |
| | | | KPDITQKDELTKKDEASPLFAGISDWA | |
| | | | PWKGEQEGL (SEQ ID NO: 1584) | |

TABLE 32
InterPro descriptions of signatures present in reverse transcriptases in Table 30
(monomeric viral RTs) and Table 31 (dimeric viral RTs).

| Signature | Database | Short Name | Description |
|---|---|---|---|
| cd01645 | CDD | RT_Rtv | RT_Rtv: Reverse transcriptases (RTs) from |
| | | | retroviruses (Rtvs). RTs catalyze the |
| | | | conversion of single-stranded RNA into |
| | | | double-stranded viral DNA for integration into |
| | | | host chromosomes. Proteins in this subfamily |
| | | | contain long terminal repeats (LTRs) and are |
| | | | multifunctional enzymes with RNA-directed |
| | | | DNA polymerase, DNA directed DNA |
| | | | polymerase, and ribonuclease hybrid (RNase |
| | | | H) activities. The viral RNA genome enters the |
| | | | cytoplasm as part of a nucleoprotein complex, |
| | | | and the process of reverse transcription |
| | | | generates in the cytoplasm forming a linear |
| | | | DNA duplex via an intricate series of steps. |
| | | | This duplex DNA is colinear with its RNA |
| | | | template, but contains terminal duplications |
| | | | known as LTRs that are not present in viral |
| | | | RNA. It has been proposed that two |
| | | | specialized template switches, known as |
| | | | strand-transfer reactions or ″jumps″, are |
| | | | required to generate the LTRs. [PMID: |
| | | | 9831551, PMID: 15107837, PMID: 11080630, |
| | | | PMID: 10799511, PMID: 7523679, PMID: |
| | | | 7540934, PMID: 8648598, PMID: 1698615] |
| cd03715 | CDD | RT_ZFREV_like | RT_ZFREV_like: A subfamily of reverse |
| | | | transcriptases (RTs) found in sequences |
| | | | similar to the intact endogenous retrovirus |
| | | | ZFERV from zebrafish and to Moloney murine |
| | | | leukemia virus RT. An RT gene is usually |
| | | | indicative of a mobile element such as a |
| | | | retrotransposon or retrovirus. RTs occur in a |
| | | | variety of mobile elements, including |
| | | | retrotransposons, retroviruses, group II introns, |
| | | | bacterial msDNAs, hepadnaviruses, and |
| | | | caulimoviruses. These elements can be divided |
| | | | into two major groups. One group contains |
| | | | retroviruses and DNA viruses whose |
| | | | propagation involves an RNA intermediate. |
| | | | They are grouped together with transposable |
| | | | elements containing long terminal repeats |
| | | | (LTRs). The other group, also called poly(A)- |
| | | | type retrotransposons, contain fungal |
| | | | mitochondrial introns and transposable |
| | | | elements that lack LTRs. Phylogenetic analysis |
| | | | suggests that ZFERV belongs to a distinct |
| | | | group of retroviruses. [PMID: 14694121, |
| | | | PMID: 2410413, PMID: 9684890, PMID: |
| | | | 10669612, PMID: 1698615, PMID: 8828137] |
| PF00078 | Pfam | RVT_1 | A reverse transcriptase gene is usually |
| | | | indicative of a mobile element such as a |
| | | | retrotransposon or retrovirus. Reverse |
| | | | transcriptases occur in a variety of mobile |
| | | | elements, including retrotransposons, |
| | | | retroviruses, group II introns, bacterial |
| | | | msDNAs, hepadnaviruses, and caulimoviruses. |
| | | | [PMID: 1698615] |
| IPR000477 | InterPro | RT_dom | The use of an RNA template to produce DNA, |
| | | | for integration into the host genome and |
| | | | exploitation of a host cell, is a strategy |
| | | | employed in the replication of retroid |
| | | | elements, such as the retroviruses and bacterial |
| | | | retrons. The enzyme catalysing polymerisation |
| | | | is an RNA-directed DNA-polymerase, or |
| | | | reverse trancriptase (RT) (2.7.7.49). Reverse |
| | | | transcriptase occurs in a variety of mobile |
| | | | elements, including retrotransposons, |
| | | | retroviruses, group II introns [PMID: |
| | | | 12758069], bacterial msDNAs, |
| | | | hepadnaviruses, and caulimoviruses. |
| | | | Retroviral reverse transcriptase is synthesised |
| | | | as part of the POL polyprotein that contains; |
| | | | an aspartyl protease, a reverse transcriptase, |
| | | | RNase H and integrase. POL polyprotein |
| | | | undergoes specific enzymatic cleavage to yield |
| | | | the mature proteins. The discovery of |
| | | | retroelements in the prokaryotes raises |
| | | | intriguing questions concerning their roles in |
| | | | bacteria and the origin and evolution of reverse |
| | | | transcriptases and whether the bacterial reverse |
| | | | transcriptases are older than eukaryotic reverse |
| | | | transcriptases [PMID: 8828137], Several |
| | | | crystal structures of the reverse transcriptase |
| | | | (RT) domain have been determined [PMID: |
| | | | 1377403], |
| IPR043502 | InterPro | DNA/RNA | This entry represents the DNA/RNA |
| | | polymerase | polymerase superfamily, which includes DNA |
| | | superfamily | polymerase I, reverse transcriptase, T7 RNA |
| | | | polymerase, lesion bypass DNA polymerase |
| | | | (Y-family), RNA-dependent RNA-polymerase |
| | | | and dsRNA phage RNA-dependent RNA- |
| | | | polymerase. These enzymes share a similar |
| | | | protein fold at their active site, which |
| | | | resembles the palm subdomain of the right- |
| | | | hand-shaped polymerases. [PMID: 26931141] |
| SSF56672 | Superfamily | DNA/RNA | This superfamily comprises DNA polymerases |
| | | polymerases | and RNA polymerases |
| PF06817 | Pfam | RVT_thumb | This domain is known as the thumb domain. It |
| | | | is composed of a four helix bundle |
| | | | [PMID: 1377403]. |
| IPR010661 | InterPro | RVT_thumb | This domain is known as the thumb domain. It |
| | | | is composed of a four helix bundle. Reverse |
| | | | transcriptase converts the viral RNA genome |
| | | | into double-stranded viral DNA. Reverse |
| | | | transcriptase often occurs in a polyprotein; |
| | | | with integrase, ribonuclease H and/or protease, |
| | | | which is cleaved before the enzyme takes |
| | | | action. The impact of antiretroviral treatment |
| | | | on the first 400 amino acids of HIV reverse |
| | | | transcriptase is good. Little is known, |
| | | | however, of the antiretroviral drug impact on |
| | | | the C-terminal domains of Pol, which includes |
| | | | the thumb, connection and RNase H. Evidence |
| | | | suggests that these might be well conserved |
| | | | domains. [PMID: 1377403, PMID: 18335052] |
| PFO6815 | Pfam | RVT_connect | This domain is known as the connection |
| | | | domain. This domain lies between the thumb |
| | | | and palm domains [PMID: 1377403]. |
| IPR010659 | InterPro | RVT_connect | This domain is known as the connection |
| | | | domain. This domain lies between the thumb |
| | | | and palm domains [PMID: 1377403]. |
| cd03715 | CDD | RT_ZFREV_like | RT_ZFREV_like: A subfamily of reverse |
| | | | transcriptases (RTs) found in sequences |
| | | | similar to the intact endogenous retrovirus |
| | | | ZFERV from zebrafish and to Moloney murine |
| | | | leukemia virus RT. An RT gene is usually |
| | | | indicative of a mobile element such as a |
| | | | retrotransposon or retrovirus. RTs occur in a |
| | | | variety of mobile elements, including |
| | | | retrotransposons, retroviruses, group II introns, |
| | | | bacterial msDNAs, hepadnaviruses, and |
| | | | caulimoviruses. These elements can be divided |
| | | | into two major groups. One group contains |
| | | | retroviruses and DNA viruses whose |
| | | | propagation involves an RNA intermediate. |
| | | | They are grouped together with transposable |
| | | | elements containing long terminal repeats |
| | | | (LTRs). The other group, also called poly(A)- |
| | | | type retrotransposons, contain fungal |
| | | | mitochondrial introns and transposable |
| | | | elements that lack LTRs. Phylogenetic analysis |
| | | | suggests that ZFERV belongs to a distinct |
| | | | group of retroviruses. [PMID: 14694121, |
| | | | PMID: 2410413, PMID: 9684890, PMID: |
| | | | 10669612, PMID: 1698615, PMID: 8828137] |

[0159] Endonuclease Domain:

[0160] In certain embodiments, the endonuclease/DNA binding domain of an APE-type retrotransposon or the endonuclease domain of an RLE-type retrotransposon can be used or can be modified (e.g., by insertion, deletion, or substitution of one or more residues) in a Gene Writer system described herein. In some embodiments the endonuclease domain or endonuclease/DNA binding domain is altered from its natural sequence to have altered codon usage, e.g. improved for human cells. In some embodiments the endonuclease element is a heterologous endonuclease element, such as Fok1 nuclease, a type-II restriction 1-like endonuclease (RLE-type nuclease), or another RLE-type endonuclease (also known as REL). In some embodiments the heterologous endonuclease activity has nickase activity and does not form double stranded breaks. In some embodiments, the heterologous endonuclease is a CRISPR-associated nuclease, e.g., Cas9, or a CRISPR-associated nuclease with nickase activity, e.g., a Cas9 nickase. The amino acid sequence of an endonuclease domain of a Gene Writer system described herein may be at least about 50%, at least about 60%, at least about 70%, at least about 80%, at least about 85%, at least about 90%, at least about 95%, at least about 96%, at least about 97%, at least about 98%, at least about 99% identical to the amino acid sequence of an endonuclease domain of a retrotransposon whose DNA sequence is referenced in Table 1, 2, or 3. A person having ordinary skill in the art is capable of identifying endounclease domains based upon homology to other known endonuclease domains using tools as Basic Local Alignment Search Tool (BLAST). In certain embodiments, the heterologous endonuclease is Fok1 or a functional fragment thereof. In certain embodiments, the heterologous endonuclease is a Holliday junction resolvase or homolog thereof, such as the Holliday junction resolving enzyme from Sulfolobus solfataricus-Ssol Hje (Govindaraju et al., Nucleic Acids Research 44:7, 2016). In certain embodiments, the heterologous endonuclease is the endonuclease of the large fragment of a spliceosomal protein, such as Prp8 (Mahbub et al., Mobile DNA 8:16, 2017). For example, a Gene Writer polypeptide described herein may comprise a reverse transcriptase domain from an APE- or RLE-type retrotransposon and an endonuclease domain that comprises Fok1 or a functional fragment thereof. In still other embodiments, homologous endonuclease domains are modified, for example by site-specific mutation, to alter DNA endonuclease activity. In still other embodiments, endonuclease domains are modified to remove any latent DNA-sequence specificity.

[0161] In addition to the target-site nick that is needed to initiate target-primed reverse transcription, supplemental endonuclease activity may be beneficial for improving the resolution of the integration event (Anzalone et al., Nature 576, 149-157 (2019)). In some embodiments, the endonuclease element of the polypeptide provides the nick for initiating target-primed reverse transcription and an additional heterologous domain of the polypeptide provides additional endonuclease activity. In some embodiments, the additional endonuclease activity is provided by a nickase. In some embodiments, the additional endonuclease activity may be provided by a heterologous DNA-binding element that also possesses endonuclease activity, e.g., a Cas9 nickase. In some embodiments, the additional endonuclease activity may be contained within the first Gene Writer polypeptide. In some embodiments, the additional endonuclease activity may be provided by a separate polypeptide.

[0162] In some embodiments, a Gene Writer polypeptide described herein comprises an endonuclease domain that cleaves at a predefined location in a target DNA sequence, e.g. as measured using an assay of Example 32 herein. In some embodiments, the endonuclease domain cleaves at a GG site in a target DNA sequence. In some embodiments, the endonuclease domain cleaves at an AAGG site in a target DNA sequence. In some embodiments, a target DNA sequence described herein comprises a GG or AAGG motif, e.g., a naturally occurring motif in the human genome.

[0163] DNA Binding Domain:

[0164] In certain aspects, the DNA-binding domain of a Gene Writer polypeptide described herein is selected, designed, or constructed for binding to a desired host DNA target sequence. In certain embodiments, the DNA-binding domain of the engineered RLE is a heterologous DNA-binding protein or domain relative to a native retrotransposon sequence. In some embodiments the heterologous DNA binding element is a zinc-finger element or a TAL effector element, e.g., a zinc-finger or TAL polypeptide or functional fragment thereof. In some embodiments the heterologous DNA binding element is a sequence-guided DNA binding element, such as Cas9, Cpf1, or other CRISPR-related protein that has been altered to have no endonuclease activity. In some embodiments the heterologous DNA binding element retains endonuclease activity. In some embodiments, the heterologous DNA binding element retains only single-stranded DNA cleavage activity, e.g., is a DNA nickase, e.g., is a Cas9 nickase. In some embodiments the heterologous DNA binding element with endonuclease activity replaces the endonuclease element of the polypeptide. In some embodiments, the heterologous DNA binding element with endonuclease activity supplements the endonuclease element of the polypeptide, e.g., causes an additional nick at the target site. In specific embodiments, the heterologous DNA-binding domain can be any one or more of Cas9, TAL domain, ZF domain, Myb domain, combinations thereof, or multiples thereof. In certain embodiments, the heterologous DNA-binding domain is a DNA binding domain of a retrotransposon described in a table herein. A person having ordinary skill in the art is capable of identifying DNA binding domains based upon homology to other known DNA binding domains using tools as Basic Local Alignment Search Tool (BLAST). In still other embodiments, DNA-binding domains are modified, for example by site-specific mutation, increasing or decreasing DNA-binding elements (for example, number and/or specificity of zinc fingers), etc., to alter DNA-binding specificity and affinity. In some embodiments the DNA binding domain is altered from its natural sequence to have altered codon usage, e.g. improved for human cells.

[0165] In some embodiments, a polypeptide described herein comprises a mutation in a DNA binding domain. In some embodiments, the mutation reduces or abrogates DNA-binding activity of the DNA binding domain, e.g., to less than 50%, 40%, 30%, 20%, 10%, 5%, 2%, or 1% of the corresponding wild-type sequence, e.g., in an assay of Example 30. The mutation may be, e.g., in a ZF1 domain, a ZF2 domain, or a c-myb domain. The mutation may be a point mutation. The mutation may be in a C residue (e.g., C to S), for instance in a C residue in a ZF1 or ZF2 domain; in an R residue (e.g., R to A), for instance in an R residue in a c-myb domain; or in a W residue (e.g., W to A), for instance in a W residue in a c-myb domain; or any combination thereof. In some embodiments, the polypeptide comprising a mutation in a DNA binding domain further comprises a heterologous DNA binding domain.

[0166] In some embodiments, a naturally occurring AAGG sequence in the genome is used as a seed for retargeting an R2 retrotransposase-based Gene Writing system, wherein the DNA binding domain is mutated or replaced with a heterologous DNA binding domain such that the binding of the Gene Writer polypeptide to the new target site results in the proper positioning of the endonuclease domain to the AAGG motif to enable endonuclease activity. In some embodiments, a target DNA sequence described herein comprises a motif recognized by an endonuclease domain (e.g., a GG or AAGG motif), e.g., a naturally occurring motif in the human genome. In some embodiments, a GeneWriter comprises a DNA binding domain (e.g., a heterologous DNA binding domain) that binds near the motif recognized by the endonuclease domain, e.g., in such a way that the endonuclease domain of the GeneWriter is positioned to cleave the motif. In some embodiments, the DNA binding domain binds a site that is within 1, 2, 3, 4, 5, 6, 7, 8, 9, 10, 15, 20, 25, 30, 35, 40, 45, 50, 55, or 60 nucleotides of the motif recognized by an endonuclease domain (e.g., the GG or AAGG motif). The DNA binding domain may bind a site that is upstream or downstream of the GG or AAGG motif. The DNA binding domain may bind a site that is in the same orientation or the reverse complement orientation compared to the motif recognized by an endonuclease domain (e.g., the GG or AAGG motif). In some embodiments, a retargeted GeneWriter polypeptide comprises (i) an endonuclease domain that recognizes a motif, and (ii) a heterologous DNA binding domain that recognizes a genomic DNA sequence. In some embodiments, the motif is about 30-80, 40-70, 50-60, or 55 nt upstream of the genomic DNA sequence, wherein optionally the motif and the genomic DNA sequence are in the same orientation. In some embodiments, the motif is about 10-30, 15-25, or 20 nt downstream of the genomic DNA sequence, wherein optionally the motif is in the reverse orientation to the genomic DNA sequence. In some embodiments, the DNA binding domain comprises a meganuclease domain (e.g., as described herein, e.g., in the endonuclease domain section), or a functional fragment thereof. In some embodiments, the meganuclease domain possesses endonuclease activity, e.g., double-strand cleavage and/or nickase activity. In other embodiments, the meganuclease domain has reduced activity, e.g., lacks endonuclease activity, e.g., the meganuclease is catalytically inactive. In some embodiments, a catalytically inactive meganuclease is used as a DNA binding domain, e.g., as described in Fonfara et al. Nucleic Acids Res 40(2):847-860 (2012), incorporated herein by reference in its entirety. In embodiments, the DNA binding domain comprises one or more modifications relative to a wild-type DNA binding domain, e.g., a modification via directed evolution, e.g., phage-assisted continuous evolution (PACE).

[0167] In certain aspects of the present invention, the host DNA-binding site integrated into by the Gene Writer system can be in a gene, in an intron, in an exon, an ORF, outside of a coding region of any gene, in a regulatory region of a gene, or outside of a regulatory region of a gene. In other aspects, the engineered RLE may bind to one or more than one host DNA sequence.

[0168] In some embodiments, a Gene Writing system is used to edit a target locus in multiple alleles. In some embodiments, a Gene Writing system is designed to edit a specific allele. For example, a Gene Writing polypeptide may be directed to a specific sequence that is only present on one allele, e.g., comprises a template RNA with homology to a target allele, e.g., a gRNA or annealing domain, but not to a second cognate allele. In some embodiments, a Gene Writing system can alter a haplotype-specific allele. In some embodiments, a Gene Writing system that targets a specific allele preferentially targets that allele, e.g., has at least a 2, 4, 6, 8, or 10-fold preference for a target allele.

[0169] In certain embodiments, a Gene Writer™ gene editor system RNA further comprises an intracellular localization sequence, e.g., a nuclear localization sequence. The nuclear localization sequence may be an RNA sequence that promotes the import of the RNA into the nucleus. In certain embodiments the nuclear localization signal is located on the template RNA. In certain embodiments, the retrotransposase polypeptide is encoded on a first RNA, and the template RNA is a second, separate, RNA, and the nuclear localization signal is located on the template RNA and not on an RNA encoding the retrotransposase polypeptide. While not wishing to be bound by theory, in some embodiments, the RNA encoding the retrotransposase is targeted primarily to the cytoplasm to promote its translation, while the template RNA is targeted primarily to the nucleus to promote its retrotransposition into the genome. In some embodiments the nuclear localization signal is at the 3′ end, 5′ end, or in an internal region of the template RNA. In some embodiments the nuclear localization signal is 3′ of the heterologous sequence (e.g., is directly 3′ of the heterologous sequence) or is 5′ of the heterologous sequence (e.g., is directly 5′ of the heterologous sequence). In some embodiments the nuclear localization signal is placed outside of the 5′ UTR or outside of the 3′ UTR of the template RNA. In some embodiments the nuclear localization signal is placed between the 5′ UTR and the 3′ UTR, wherein optionally the nuclear localization signal is not transcribed with the transgene (e.g., the nuclear localization signal is an anti-sense orientation or is downstream of a transcriptional termination signal or polyadenylation signal). In some embodiments the nuclear localization sequence is situated inside of an intron. In some embodiments a plurality of the same or different nuclear localization signals are in the RNA, e.g., in the template RNA. In some embodiments the nuclear localization signal is less than 5, 10, 25, 50, 75, 100, 150, 200, 250, 300, 350, 400, 450, 500, 600, 700, 800, 900 or 1000 bp in length. Various RNA nuclear localization sequences can be used. For example, Lubelsky and Ulitsky, Nature 555 (107-111), 2018 describe RNA sequences which drive RNA localization into the nucleus. In some embodiments, the nuclear localization signal is a SINE-derived nuclear RNA localization (SIRLOIN) signal. In some embodiments the nuclear localization signal binds a nuclear-enriched protein. In some embodiments the nuclear localization signal binds the HNRNPK protein. In some embodiments the nuclear localization signal is rich in pyrimidines, e.g., is a C/T rich, C/U rich, C rich, T rich, or U rich region. In some embodiments the nuclear localization signal is derived from a long non-coding RNA. In some embodiments the nuclear localization signal is derived from MALAT1 long non-coding RNA or is the 600 nucleotide M region of MALAT1 (described in Miyagawa et al., RNA 18, (738-751), 2012). In some embodiments the nuclear localization signal is derived from BORG long non-coding RNA or is a AGCCC motif (described in Zhang et al., Molecular and Cellular Biology 34, 2318-2329 (2014). In some embodiments the nuclear localization sequence is described in Shukla et al., The EMBO Journal e98452 (2018). In some embodiments the nuclear localization signal is derived from a non-LTR retrotransposon, an LTR retrotransposon, retrovirus, or an endogenous retrovirus.

[0170] In some embodiments, a polypeptide described herein comprises one or more (e.g., 2, 3, 4, 5) nuclear targeting sequences, for example, a nuclear localization sequence (NLS), e.g., as described above. In some embodiments, the NLS is a bipartite NLS. In some embodiments, an NLS facilitates the import of a protein comprising an NLS into the cell nucleus. In some embodiments, the NLS is fused to the N-terminus of a Gene Writer described herein. In some embodiments, the NLS is fused to the C-terminus of the Gene Writer. In some embodiments, the NLS is fused to the N-terminus or the C-terminus of a Cas domain. In some embodiments, a linker sequence is disposed between the NLS and the neighboring domain of the Gene Writer.

[0171] In some embodiments, an NLS comprises the amino acid sequence MDSLLMNRRKFLYQFKNVRWAKGRRETYLC(SEQ ID NO: 1585), PKKRKVEGADKRTADGSEFESPKKKRKV(SEQ ID NO: 1586), RKSGKIAAIWKRPRKPKKKRKV(SEQ ID NO: 1587), KRTADGSEFESPKKKRKV(SEQ ID NO: 1588), KKTELQTTNAENKTKKL(SEQ ID NO: 1589), or KRGINDRNFWRGENGRKTR(SEQ ID NO: 1590), KRPAATKKAGQAKKKK(SEQ ID NO: 1591), or a functional fragment or variant thereof. Exemplary NLS sequences are also described in PCT/EP2000/011690, the contents of which are incorporated herein by reference for their disclosure of exemplary nuclear localization sequences. In some embodiments, an NLS comprises an amino acid sequence as disclosed in Table 39. An NLS of this table may be utilized with one or more copies in a polypeptide in one or more locations in a polypeptide, e.g., 1, 2, 3 or more copies of an NLS in an N-terminal domain, within peptide domains, between peptide domains, in a C-terminal domain, or in a combination of locations, in order to improve subcellular localization to the nucleus. Multiple unique sequences may be used within a single polypeptide. Sequences may be naturally monopartite or bipartite, e.g., having one or two stretches of basic amino acids, or may be used as chimeric bipartite sequences. Sequence references correspond to UniProt accession numbers, except where indicated as SeqNLS for sequences mined using a subcellular localization prediction algorithm (Lin et al BMC Bioinformat 13:157 (2012), incorporated herein by reference in its entirety).

TABLE 39
Exemplary nuclear localization signals
for use in Gene Writing systems

| | Sequence | SEQ ID |
|---|---|---|
| Sequence | References | No. |
| AHFKISGEKRPSTD | Q76IQ7 | 1823 |
| PGKKAKNPKKKKKK | | |
| DP | | |
| AHRAKKMSKTHA | P21827 | 1824 |
| ASPEYVNLPINGNG | SeqNLS | 1825 |
| CTKRPRW | 088622, Q86W56, | 1826 |
| | Q9QYM2, O02776 | |
| DKAKRVSRNKSEKK | 015516, Q5RAK8, | 1827 |
| RR | Q91YB2, Q91YB0, | |
| | Q8QGQ6, O08785, | |
| | Q9WVS9, Q6YGZ4 | |
| EELRLKEELLKGIY | Q9QY16, Q9UHL0, | 1828 |
| A | Q2TBP1, Q9QY15 | |
| EEQLRRRKNSRLNN | G5EFF5 | 1829 |
| TG | | |
| EVLKVIRTGKRKKK | SeqNLS | 1830 |
| AWKRMVTKVC | | |
| HHHHHHHHHHHHQP | Q63934, G3V7L5, | 1831 |
| H | Q12837 | |
| HKKKHPDASVNFSE | P10103, Q4R844, | 1832 |
| FSK | P12682, BOCM99, | |
| | A9RA84, Q6YKA4, | |
| | P09429, P63159, | |
| | Q08IE6, P63158, | |
| | Q9YH06, BIMTB0 | |
| HKRTKK | Q2R2D5 | 1833 |
| IINGRKLKLKKSRR | SeqNLS | 1834 |
| RSSQTSNNSFTSRR | | |
| S | | |
| KAEQERRK | Q8LH59 | 1835 |
| KEKRKRREELFIEQ | SeqNLS | 1836 |
| KKRK | | |
| KKGKDEWFSRGKKP | P30999 | 1837 |
| KKGPSVQKRKKT | Q6ZN17 | 1838 |
| KKKTVINDLLHYKK | SeqNLS, P32354 | 1839 |
| EK | | |
| KKNGGKGKNKPSAK | SeqNLS | 1840 |
| IKK | | |
| KKPKWDDFKKKKK | Q15397, Q8BKS9, | 1841 |
| | Q562C7 | |
| KKRKKD | SeqNLS, Q91Z62, | 1842 |
| | Q1A730, Q969P5, | |
| | Q2KHT6, Q9CPU7 | |
| KKRRKRRRK | SeqNLS | 1843 |
| KKRRRRARK | Q9UMS6, D4A702, | 1844 |
| | Q91YE8 | |
| KKSKRGR | Q9UBS0 | 1845 |
| KKSRKRGS | B4FG96 | 1846 |
| KKSTALSRELGKIM | SeqNLS, P32354 | 1847 |
| RRR | | |
| KKSYQDPEIIAHSR | Q9U7C9 | 1848 |
| PRK | | |
| KKTGKNRKLKSKRV | Q9Z301, O54943, | 1849 |
| KTR | Q8K3T2 | |
| KKVSIAGQSGKLWR | Q6YUL8 | 1850 |
| WKR | | |
| KKYENVVIKRSPRK | SeqNLS | 1851 |
| RGRPRK | | |
| KNKKRK | SeqNLS | 1852 |
| KPKKKR | SeqNLS | 1853 |
| KRAMKDDSHGNSTS | Q0E671 | 1854 |
| PKRRK | | |
| KRANSNLVAAYEKA | P23508 | 1855 |
| KKK | | |
| KRASEDTTSGSPPK | Q9BZZ5, Q5R644 | 1856 |
| KSSAGPKR | | |
| KRFKRRWMVRKMKT | SeqNLS | 1857 |
| KK | | |
| KRGLNSSFETSPKK | Q8IV63 | 1858 |
| VK | | |
| KRGNSSIGPNDLSK | SeqNLS | 1859 |
| RKQRKK | | |
| KRIHSVSLSQSQID | SeqNLS | 1860 |
| PSKKVKRAK | | |
| KRKGKLKNKGSKRK | O15381 | 1861 |
| K | | |
| KRRRRRRREKRKR | Q96GM8 | 1862 |
| KRSNDRTYSPEEEK | Q91ZF2 | 1863 |
| QRRA | | |
| KRTVATNGDASGAH | SeqNLS | 1864 |
| RAKKMSK | | |
| KRVYNKGEDEQEHL | SeqNLS | 1865 |
| PKGKKR | | |
| KSGKAPRRRAVSMD | Q9WVH4, O43524 | 1866 |
| NSNK | | |
| KVNFLDMSLDDIII | Q9P127 | 1867 |
| YKELE | | |
| KVQHRIAKKTTRRR | Q9DXE6 | 1868 |
| R | | |
| LSPSLSPL | Q9Y261,P32182, | 1869 |
| | P35583 | |
| MDSLLMNRRKFLYQ | Q9GZX7 | 1870 |
| FKNVRWAKGRRETY | | |
| LC | | |
| MPQNEYIELHRKRY | SeqNLS | 1871 |
| GYRLDYHEKKRKKE | | |
| SREAHERSKKAKKM | | |
| IGLKAKLYHK | | |
| MVQLRPRASR | SeqNLS | 1872 |
| NNKLLAKRRKGGAS | Q965G5 | 1873 |
| PKDDPMDDIK | | |
| NYKRPMDGTYGPPA | O14497, A2BH40 | 1874 |
| KRHEGE | | |
| PDTKRAKLDSSETT | SeqNLS | 1875 |
| MVKKK | | |
| PEKRTKI | SeqNLS | 1876 |
| PGGRGKKK | Q719N1, Q9UBP0, | 1877 |
| | A2VDN5 | |
| PGKMDKGEHRQERR | Q01844, Q61545 | 1878 |
| DRPY | | |
| PKKGDKYDKTD | Q45FA5 | 1879 |
| PKKKSRK | O35914, Q01954 | 1880 |
| PKKNKPE | Q22663 | 1881 |
| PKKRAKV | P04295, P89438 | 1882 |
| PKPKKLKVE | P55263, P55262, | 1883 |
| | P55264, Q64640 | |
| PKRGRGR | Q9FYS5, Q43386 | 1884 |
| PKRRLVDDA | P0C797 | 1885 |
| PKRRRTY | SeqNLS | 1886 |
| PLFKRR | A8X6H4, Q9TXJ0 | 1887 |
| PLRKAKR | Q86WB0, Q5R8V9 | 1888 |
| PPAKRKCIF | Q6AZ28, O75928, | 1889 |
| | Q8C5D8 | |
| PPARRRRL | Q8NAG6 | 1890 |
| PPKKKRKV | Q3L6L5, P03070, | 1891 |
| | P14999, P03071 | |
| PPNKRMKVKH | Q8BN78 | 1892 |
| PPRIYPQLPSAPT | P0C799 | 1893 |
| PQRSPFPKSSVKR | SeqNLS | 1894 |
| PRPRKVPR | P0C799 | 1895 |
| PRRRVQRKR | SeqNLS, Q5R448, | 1896 |
| | Q5TAQ9 | |
| PRRVRLK | Q58DJ0, P56477, | 1897 |
| | Q13568 | |
| PSRKRPR | Q62315, Q5F363, | 1898 |
| | Q92833 | |
| PSSKKRKV | SeqNLS | 1899 |
| PTKKRVK | P07664 | 1900 |
| QRPGPYDRP | SeqNLS | 1901 |
| RGKGGKGLGKGGAK | SeqNLS | 1902 |
| RHRK | | |
| RKAGKGGGGHKTTK | B4FG96 | 1903 |
| KRSAKDEKVP | | |
| RKIKLKRAK | A1L3G9 | 1904 |
| RKIKRKRAK | B9X187 | 1905 |
| RKKEAPGPREELRS | O35126, P54258, | 1906 |
| RGR | Q5IS70, P54259 | |
| RKKRKGK | SeqNLS, Q29243, | 1907 |
| | Q62165, Q28685, | |
| | 018738, Q9TSZ6, | |
| | Q14118 | |
| RKKRRQRRR | P04326, P69697, | 1908 |
| | P69698, P05907, | |
| | P20879, P04613, | |
| | P19553, P0C1J9, | |
| | P20893, P12506, | |
| | P04612, Q73370, | |
| | POCIKO, P05906, | |
| | P35965, P04609, | |
| | P04610, P04614, | |
| | P04608, P05905 | |
| RKKSIPLSIKNLKR | Q9C0C9 | 1909 |
| KHKRKKNKITR | | |
| RKLVKPKNTKMKTK | Q14190 | 1910 |
| LRTNPY | | |
| RKRLILSDKGQLDW | SeqNLS, Q91Z62, | 1911 |
| KK | Q1A730, Q2KHT6, | |
| | Q9CPU7 | |
| RKRLKSK | Q13309 | 1912 |
| RKRRVRDNM | Q8QPH4, Q809M7, | 1913 |
| | A8C8X1, Q2VNC5, | |
| | Q38SQ0, O89749, | |
| | Q6DNQ9, Q809L9, | |
| | Q0A429, Q20NV3, | |
| | P16509, P16505, | |
| | Q6DNQ5, P16506, | |
| | Q6XT06, P26118, | |
| | Q2ICQ2, Q2RCG8, | |
| | Q0A2D0, Q0A2H9, | |
| | Q9IQ46, Q809M3, | |
| | Q6J847, Q6J856, | |
| | B4URE4, A4GCM7, | |
| | Q0A440, P26120, | |
| | P16511, | |
| RKRSPKDKKEKDLD | Q7RTP6 | 1914 |
| GAGKRRKT | | |
| RKRTPRVDGQTGEN | O94851 | 1915 |
| DMNKRRRK | | |
| RLPVRRRRRR | P04499, P12541, | 1916 |
| | P03269, P48313, | |
| | P03270 | |
| RLRFRKPKSK | P69469 | 1917 |
| RQQRKR | Q14980 | 1918 |
| RRDLNSSFETSPKK | Q8K3G5 | 1919 |
| VK | | |
| RRDRAKLR | Q9SLB8 | 1920 |
| RRGDGRRR | Q80WE1, Q5R9B4, | 1921 |
| | Q06787, P35922 | |
| RRGRKRKAEKQ | Q812D1, Q5XXA9, | 1922 |
| | Q99JF8, Q8MJG1, | |
| | Q66T72, 075475 | |
| RRKKRR | QOVD86, Q58DS6, | 1923 |
| | Q5R6G2, Q9ERI5, | |
| | Q6AYK2, Q6NYC1 | |
| RRKRSKSEDMDSVE | Q7TT18 | 1924 |
| SKRRR | | |
| RRKRSR | Q99PU7, D3ZHS6, | 1925 |
| | Q92560, A2VDM8 | |
| RRPKGKTLQKRKPK | Q6ZN17 | 1926 |
| RRRGFERFGPDNMG | Q63014, Q9DBR0 | 1927 |
| RKRK | | |
| RRRGKNKVAAQNCR | SeqNLS | 1928 |
| K | | |
| RRRKRR | Q5FVH8, Q6MZT1, | 1929 |
| | Q08DH5, Q8BQP9 | |
| RRRQKQKGGASRRR | SeqNLS | 1930 |
| RRRREGPRARRRR | P08313, P10231 | 1931 |
| RRTIRLKLVYDKCD | SeqNLS | 1932 |
| RSCKIQKKNRNKCQ | | |
| YCRFHKCLSVGMSH | | |
| NAIRFGRMPRSEKA | | |
| KLKAE | | |
| RRVPQRKEVSRCRK | Q5RJN4, Q32L09, | 1933 |
| CRK | Q8CAK3, Q9NUL5 | |
| RVGGRRQAVECIED | P03255 | 1934 |
| LLNEPGQPLDLSCK | | |
| RPRP | | |
| RVVKLRIAP | P52639, Q8JMN0 | 1935 |
| RWRRR | P70278 | 1936 |
| SKRKTKISRKTR | Q5RAY1, O00443 | 1937 |
| SYVKTVPNRTRTYI | P21935 | 1938 |
| KL | | |
| TGKNEAKKRKIA | P52739, Q8K3J5, | 1939 |
| | Q5RAU9 | |
| TLSPASSPSSVSCP | SeqNLS | 1940 |
| VIPASTDESPGSAL | | |
| NI | | |
| VSKKQRTGKKIH | P52739, Q8K3J5, | 1941 |
| | Q5RAU9 | |
| SPKKKRKVE | | 1942 |
| KRTADGSEFESPKK | | 1943 |
| KRKVE | | |
| PAAKRVKLD | | 1944 |
| PKKKRKV | | 1945 |
| MDSLLMNRRKFLYQ | | 1946 |
| FKNVRWAKGRRETY | | |
| LC | | |
| SPKKKRKVEAS | | 1947 |
| MAPKKKRKVGIHRG | | 1948 |
| VP | | |

[0172] In some embodiments, the NLS is a bipartite NLS. A bipartite NLS typically comprises two basic amino acid clusters separated by a spacer sequence (which may be, e.g., about 10 amino acids in length). A monopartite NLS typically lacks a spacer. An example of a bipartite NLS is the nucleoplasmin NLS, having the sequence KR[PAATKKAGQA]KKKK (SEQ ID NO: 1591), wherein the spacer is bracketed. Another exemplary bipartite NLS has the sequence PKKKRKVEGADKRTADGSEFESPKKKRKV (SEQ ID NO: 1593). Exemplary NLSs are described in International Application WO2020051561, which is herein incorporated by reference in its entirety, including for its disclosures regarding nuclear localization sequences.

[0173] In certain embodiments, a Gene Writer™ gene editor system polypeptide further comprises an intracellular localization sequence, e.g., a nuclear localization sequence and/or a nucleolar localization sequence. The nuclear localization sequence and/or nucleolar localization sequence may be amino acid sequences that promote the import of the protein into the nucleus and/or nucleolus, where it can promote integration of heterologous sequence into the genome. In certain embodiments, a Gene Writer gene editor system polypeptide (e.g., a retrotransposase, e.g., a polypeptide according to any of Tables 1, 2, or 3 herein) further comprises a nucleolar localization sequence. In certain embodiments, the retrotransposase polypeptide is encoded on a first RNA, and the template RNA is a second, separate, RNA, and the nucleolar localization signal is encoded on the RNA encoding the retrotransposase polypeptide and not on the template RNA. In some embodiments, the nucleolar localization signal is located at the N-terminus, C-terminus, or in an internal region of the polypeptide. In some embodiments, a plurality of the same or different nucleolar localization signals are used. In some embodiments, the nuclear localization signal is less than 5, 10, 25, 50, 75, or 100 amino acids in length. Various polypeptide nucleolar localization signals can be used. For example, Yang et al., Journal of Biomedical Science 22, 33 (2015), describe a nuclear localization signal that also functions as a nucleolar localization signal. In some embodiments, the nucleolar localization signal may also be a nuclear localization signal. In some embodiments, the nucleolar localization signal may overlap with a nuclear localization signal. In some embodiments, the nucleolar localization signal may comprise a stretch of basic residues. In some embodiments, the nucleolar localization signal may be rich in arginine and lysine residues. In some embodiments, the nucleolar localization signal may be derived from a protein that is enriched in the nucleolus. In some embodiments, the nucleolar localization signal may be derived from a protein enriched at ribosomal RNA loci. In some embodiments, the nucleolar localization signal may be derived from a protein that binds rRNA. In some embodiments, the nucleolar localization signal may be derived from MSP58. In some embodiments, the nucleolar localization signal may be a monopartite motif. In some embodiments, the nucleolar localization signal may be a bipartite motif. In some embodiments, the nucleolar localization signal may consist of a multiple monopartite or bipartite motifs. In some embodiments, the nucleolar localization signal may consist of a mix of monopartite and bipartite motifs. In some embodiments, the nucleolar localization signal may be a dual bipartite motif. In some embodiments, the nucleolar localization motif may be a KRASSQALGTIPKRRSSSRFIKRKK (SEQ ID NO: 1530). In some embodiments, the nucleolar localization signal may be derived from nuclear factor-KB-inducing kinase. In some embodiments, the nucleolar localization signal may be an RKKRKKK motif (SEQ ID NO: 1531) (described in Birbach et al., Journal of Cell Science, 117 (3615-3624), 2004).

[0174] Since an endogenous nucleolar localization signal may help drive the Gene Writer polypeptide to the nucleolus for those polypeptides derived from retrotransposons naturally targeting the rDNA, e.g., R1, R2, R4, R8, R9, it may be beneficial to inactivate this signal when retargeting to a site outside of the rDNA. An endogenous nucleolar localization signal (NoLS) can be computationally predicted using a published algorithm trained on validated proteins that localize to the nucleolus (Scott, M. S., et al, Nucleic Acids Research, 38(21), 7388-7399 (2010)). The predicted NoLS sequence is based on both amino acid sequence, amino acid sequence context, and predicted secondary structure of the retrotransposase. The identified sequence is typically rich with basic amino acids (Scott, M. S., et al, Nucleic Acids Research, 38(21), 7388-7399 (2010)) and mutating these residues to simple side-chain, non-basic, amino acids or removing them from the polypeptide chain can prevent localization to the nucleolus (Yang, C. P., et. al., Journal of Biomedical Science, 22(1), 1-15. (2015), Martin, R. M., et. al., Nucleus, 6(4), 314-325 (2015)). In some embodiments, the NoLS sequence is located in the amino acid region of a retrotransposase that is between the reverse transcriptase domain and the restriction-like endonuclease domain. In some embodiments, a predicted NoLS region contains lysine, arginine, histidine, and/or glutamine amino acids and nucleolar localization is inactivated by mutation of one or more of these residues to alanine and/or removal from the polypeptide.

[0175] In some embodiments, a nucleic acid described herein (e.g., an RNA encoding a GeneWriter polypeptide, or a DNA encoding the RNA) comprises a microRNA binding site. In some embodiments, the microRNA binding site is used to increase the target-cell specificity of a GeneWriter system. For instance, the microRNA binding site can be chosen on the basis that is is recognized by a miRNA that is present in a non-target cell type, but that is not present (or is present at a reduced level relative to the non-target cell) in a target cell type. Thus, when the RNA encoding the GeneWriter polypeptide is present in a non-target cell, it would be bound by the miRNA, and when the RNA encoding the GeneWriter polypeptide is present in a target cell, it would not be bound by the miRNA (or bound but at reduced levels relative to the non-target cell). While not wishing to be bound by theory, binding of the miRNA to the RNA encoding the GeneWriter polypeptide may reduce production of the GeneWriter polypeptide, e.g., by degrading the mRNA encoding the polypeptide or by interfering with translation. Accordingly, the heterologous object sequence would be inserted into the genome of target cells more efficiently than into the genome of non-target cells. A system having a microRNA binding site in the RNA encoding the GeneWriter polypeptide (or encoded in the DNA encoding the RNA) may also be used in combination with a template RNA that is regulated by a second microRNA binding site, e.g., as described herein in the section entitled “Template RNA component of Gene Writer™ gene editor system.” In some embodiments, e.g., for liver indications, a miRNA is selected from Table 4 of WO2020014209, which is hereby incorporated by reference.

[0176] In some embodiments, the DNA encoding a Gene Writer polypeptide comprises a promoter sequence, e.g., a tissue specific promoter sequence. In some embodiments, the tissue-specific promoter is used to increase the target-cell specificity of a Gene Writer™ system. For instance, the promoter can be chosen on the basis that it is active in a target cell type but not active in (or active at a lower level in) a non-target cell type. A system having a tissue-specific promoter sequence in the DNA of the polypeptide may also be used in combination with a microRNA binding site, e.g., in the template RNA or a nucleic acid encoding a Gene Writer™ protein, e.g., as described herein. A system having a tissue-specific promoter sequence in the DNA encoding the Gene Writer polypeptide may also be used in combination with a DNA encoding the RNA template driven by a tissue-specific promoter, e.g., to achieve higher levels of RNA template in target cells than in non-target cells. In some embodiments, e.g., for liver indications, a tissue-specific promoter is selected from Table 3 of WO2020014209, which is hereby incorporated by reference.

[0177] A skilled artisan can, based on the Accession numbers provided in Tables 1-3 determine the nucleic acid and corresponding polypeptide sequences of each retrotransposon and domains thereof, e.g., by using routine sequence analysis tools as Basic Local Alignment Search Tool (BLAST) or CD-Search for conserved domain analysis. Other sequence analysis tools are known and can be found, e.g., at https://molbiol-tools.ca, for example, at https://molbiol-tools.ca/Motifs.htm. SEQ ID NOs 1-112 align with each row in Table 1, and SEQ ID NOs 113-1015 align with the first 903 rows of Table 2.

[0178] Tables 1-3 herein provide the sequences of exemplary transposons, including the amino acid sequence of the retrotransposase, and sequences of 5′ and 3′ untranslated regions to allow the retrotransposase to bind the template RNA, and the full transposon nucleic acid sequence. In some embodiments, a 5′ UTR of any of Tables 1-3 allows the retrotransposase to bind the template RNA. In some embodiments, a 3′ UTR of any of Tables 1-3 allows the retrotransposase to bind the template RNA. Thus, in some embodiments, a polypeptide for use in any of the systems described herein can be a polypeptide of any of Tables 1-3 herein, or a sequence having at least 70%, 75%, 80%, 85%, 90%, 95%, 96%, 97%, 98%, or 99% identity thereto. In some embodiments, the system further comprises one or both of a 5′ or 3′ untranslated region of any of Tables 1-3 herein (or a sequence having at least 70%, 75%, 80%, 85%, 90%, 95%, 96%, 97%, 98%, or 99% identity thereto), e.g., from the same transposon as the polypeptide referred to in the preceding sentence, as indicated in the same row of the same table. In some embodiments, the system comprises one or both of a 5′ or 3′ untranslated region of any of Tables 1-3 herein, e.g., a segment of the full transposon sequence that encodes an RNA that is capable of binding a retrotransposase, and/or the sub-sequence provided in the column entitled Predicted 5′ UTR or Predicted 3′ UTR.

[0179] In some embodiments, a polypeptide for use in any of the systems described herein can be a molecular reconstruction or ancestral reconstruction based upon the aligned polypeptide sequence of multiple retrotransposons. In some embodiments, a 5′ or 3′ untranslated region for use in any of the systems described herein can be a molecular reconstruction based upon the aligned 5′ or 3′ untranslated region of multiple retrotransposons. A skilled artisan can, based on the Accession numbers provided herein, align polypeptides or nucleic acid sequences, e.g., by using routine sequence analysis tools as Basic Local Alignment Search Tool (BLAST) or CD-Search for conserved domain analysis. Molecular reconstructions can be created based upon sequence consensus, e.g. using approaches described in Ivics et al., Cell 1997, 501-510; Wagstaff et al., Molecular Biology and Evolution 2013, 88-99. In some embodiments, the retrotransposon from which the 5′ or 3′ untranslated region or polypeptide is derived is a young or a recently active mobile element, as assessed via phylogenetic methods such as those described in Boissinot et al., Molecular Biology and Evolution 2000, 915-928.

[0180] Table 3 (below) shows exemplary Gene Writer proteins and associated sequences from a variety of retrotransposases, identified using data mining. Column 1 indicates the family to which the retrotransposon belongs. Column 2 lists the element name. Column 3 indicates an accession number, if any. Column 4 lists an organism in which the retrotransposase is found. Column 5 lists the DNA sequence of the retrotransposon. Column 6 lists the predicted 5′ untranslated region, and column 7 lists the predicted 3′ untranslated region; both are segments of the sequence of column 5 that are predicted to allow the template RNA to bind the retrotransposase of column 8. (It is understood that columns 5-7 show the DNA sequence, and that an RNA sequence according to any of columns 5-7 would typically include uracil rather than thymidine.) Column 8 lists the predicted retrotransposase sequence encoded in the retrotransposon of column 5.

Lengthy table referenced here
US20230242899A1-20230803-T00001
Please refer to the end of the specification for access instructions.

[0181] Exemplary Cis Gene-Writing Embodiments

[0182] In some embodiments, a writing domain (e.g., RT domain) comprises an RNA-binding domain, e.g., that specifically binds to an RNA sequence. In some embodiments, a template RNA comprises an RNA sequence that is specifically bound by the RNA-binding domain of the writing domain.

[0183] Template Nucleic Acid Binding Domain:

[0184] The Gene Writer polypeptide typically contains regions capable of associating with the Gene Writer template nucleic acid (e.g., template RNA). In some embodiments, the template nucleic acid binding domain is an RNA binding domain. In some embodiments, the RNA binding domain is a modular domain that can associate with RNA molecules containing specific signatures, e.g., structural motifs, e.g., secondary structures present in the 3′ UTR in non-LTR retrotransposons. In other embodiments, the template nucleic acid binding domain (e.g., RNA binding domain) is contained within the reverse transcription domain, e.g., the reverse transcriptase-derived component has a known signature for RNA preference, e.g., secondary structures present in the 3′ UTR in non-LTR retrotransposons. In other embodiments, the template nucleic acid binding domain (e.g., RNA binding domain) is contained within the DNA binding domain. For example, in some embodiments, the DNA binding domain is a CRISPR-associated protein that recognizes the structure of a template nucleic acid (e.g., template RNA) comprising a gRNA. In some embodiments, the gRNA is a short synthetic RNA composed of a scaffold sequence that participates in CRISPR-associated protein binding and a user-defined ˜20 nucleotide targeting sequence for a genomic target. The structure of a complete gRNA was described by Nishimasu et al. Cell 156, P935-949 (2014). The gRNA (also referred to as sgRNA for single-guide RNA) consists of crRNA- and tracrRNA-derived sequences connected by an artificial tetraloop. The crRNA sequence can be divided into guide (20 nt) and repeat (12 nt) regions, whereas the tracrRNA sequence can be divided into anti-repeat (14 nt) and three tracrRNA stem loops (Nishimasu et al. Cell 156, P935-949 (2014)). In practice, guide RNA sequences are generally designed to have a length of between 17-24 nucleotides (e.g., 19, 20, or 21 nucleotides) and be complementary to a targeted nucleic acid sequence. Custom gRNA generators and algorithms are available commercially for use in the design of effective guide RNAs. In some embodiments, the gRNA comprises two RNA components from the native CRISPR system, e.g. crRNA and tracrRNA. As is well known in the art, the gRNA may also comprise a chimeric, single guide RNA (sgRNA) containing sequence from both a tracrRNA (for binding the nuclease) and at least one crRNA (to guide the nuclease to the sequence targeted for editing/binding). Chemically modified sgRNAs have also been demonstrated to be effective for use with CRISPR-associated proteins; see, for example, Hendel et al. (2015) Nature Biotechnol., 985-991. In some embodiments, a gRNA comprises a nucleic acid sequence that is complementary to a DNA sequence associated with a target gene. In some embodiments, a polypeptide comprises a DNA-binding domain comprising a CRISPR-associated protein that associates with a gRNA that allows the DNA-binding domain to bind a target genomic DNA sequence. In some embodiments, the gRNA is comprised within the template nucleic acid (e.g., template RNA), thus the DNA-binding domain is also the template nucleic acid binding domain. In some embodiments, the polypeptide possesses RNA binding function in multiple domains, e.g., can bind a gRNA structure in a CRISPR-associated DNA binding domain and a 3′ UTR structure in a non-LTR retrotransposon derived reverse transcription domain.

[0185] Endonuclease Domain:

[0186] In some embodiments, a Gene Writer polypeptide possesses the function of DNA target site cleavage via an endonuclease domain. In some embodiments, the endonuclease domain is also a DNA-binding domain. In some embodiments, the endonuclease domain is also a template nucleic acid (e.g., template RNA) binding domain. For example, in some embodiments a polypeptide comprises a CRISPR-associated endonuclease domain that binds a template RNA comprising a gRNA, binds a target DNA sequence (e.g., with complementarity to a portion of the gRNA), and cuts the target DNA sequence. In certain embodiments, the endonuclease/DNA binding domain of an APE-type retrotransposon or the endonuclease domain of an RLE-type retrotransposon can be used or can be modified (e.g., by insertion, deletion, or substitution of one or more residues) in a Gene Writer system described herein. In some embodiments the endonuclease domain or endonuclease/DNA binding domain is altered from its natural sequence to have altered codon usage, e.g. improved for human cells. In some embodiments the endonuclease element is a heterologous endonuclease element, such as Fok1 nuclease, a type-II restriction 1-like endonuclease (RLE-type nuclease), or another RLE-type endonuclease (also known as REL). In some embodiments the heterologous endonuclease activity has nickase activity and does not form double stranded breaks. The amino acid sequence of an endonuclease domain of a Gene Writer system described herein may be at least about 50%, at least about 60%, at least about 70%, at least about 80%, at least about 85%, at least about 90%, at least about 95%, at least about 96%, at least about 97%, at least about 98%, at least about 99% identical to the amino acid sequence of an endonuclease domain of a retrotransposon whose DNA sequence is referenced in Table 1, 2, or 3. A person having ordinary skill in the art is capable of identifying endonuclease domains based upon homology to other known endonuclease domains using tools such as Basic Local Alignment Search Tool (BLAST). In certain embodiments, the heterologous endonuclease is Fok1 or a functional fragment thereof. In certain embodiments, the heterologous endonuclease is a Holliday junction resolvase or homolog thereof, such as the Holliday junction resolving enzyme from Sulfolobus solfataricus-Ssol Hje (Govindaraju et al., Nucleic Acids Research 44:7, 2016). In certain embodiments, the heterologous endonuclease is the endonuclease of the large fragment of a spliceosomal protein, such as Prp8 (Mahbub et al., Mobile DNA 8:16, 2017). In certain embodiments, the heterologous endonuclease is derived from a CRISPR-associated protein, e.g., Cas9. In certain embodiments, the heterologous endonuclease is engineered to have only ssDNA cleavage activity, e.g., only nickase activity, e.g., be a Cas9 nickase. For example, a Gene Writer polypeptide described herein may comprise a reverse transcriptase domain from an APE- or RLE-type retrotransposon and an endonuclease domain that comprises Fok1 or a functional fragment thereof. In still other embodiments, homologous endonuclease domains are modified, for example by site-specific mutation, to alter DNA endonuclease activity. In still other embodiments, endonuclease domains are modified to remove any latent DNA-sequence specificity.

[0187] In some embodiments the endonuclease domain has nickase activity and does not form double stranded breaks. In some embodiments, the endonuclease domain forms single stranded breaks at a higher frequency than double stranded breaks, e.g., at least 90%, 95%, 96%, 97%, 98%, or 99% of the breaks are single stranded breaks, or less than 10%, 5%, 4%, 3%, 2%, or 1% of the breaks are double stranded breaks. In some embodiments, the endonuclease forms substantially no double stranded breaks. In some embodiments, the enonuclease does not form detectable levels of double stranded breaks.

[0188] In some embodiments, the endonuclease domain has nickase activity that nicks the target site DNA of the to-be-edited strand; e.g., in some embodiments, the endonuclease domain cuts the genomic DNA of the target site near to the site of alteration on the strand that will be extended by the writing domain. In some embodiments, the endonuclease domain has nickase activity that nicks the target site DNA of the to-be-edited strand and does not nick the target site DNA of the non-edited strand. For example, when a polypeptide comprises a CRISPR-associated endonuclease domain having nickase activity and that does not form double stranded breaks, in some embodiments said CRISPR-associated endonuclease domain nicks the target site DNA strand containing the PAM site (e.g., and does not nick the target site DNA strand that does not contain the PAM site).

[0189] In some other embodiments, the endonuclease domain has nickase activity that nicks the target site DNA of the to-be-edited strand and the non-edited strand. Without wishing to be bound by theory, after a writing domain (e.g., RT domain) of a polypeptide described herein polymerizes (e.g., reverse transcribes) from the heterologous object sequence of a template nucleic acid (e.g., template RNA), the cellular DNA repair machinery must repair the nick on the to-be-edited DNA strand. The target site DNA now contains two different sequences for the to-be-edited DNA strand: one corresponding to the original genomic DNA and a second corresponding to that polymerized from the heterologous object sequence. It is thought that the two different sequences equilibrate with one another, first one hybridizing the non-edited strand, then the other, and which the cellular DNA repair apparatus incorporates into its repaired target site is thought to be random. Without wishing to be bound by theory, it is thought that introducing an additional nick to the non-edited strand may bias the cellular DNA repair machinery to adopt the heterologous object sequence-based sequence more frequently than the original genomic sequence. In some embodiments, the additional nick is positioned at least 10, 15, 20, 25, 30, 35, 40, 45, 50, 55, 60, 65, 70, 75, 80, 85, 90, 95, 100, 105, 110, 115, 120, 125, 130, 135, 140, 145, or 150 nucleotides 5′ or 3′ of the target site modification (e.g., the insertion, deletion, or substitution) or to the nick on the to-be-edited strand.

[0190] Alternatively or additionally, without wishing to be bound by theory, it is thought that an additional nick to the non-edited strand may promote second strand synthesis. In some embodiments, where the Gene Writer has inserted or substituted a portion of the edited strand, synthesis of a new sequence corresponding to the insertion/substitution in the non-edited strand is necessary.

[0191] In some embodiments, the polypeptide comprises a single domain having endonuclease activity (e.g., a single endonuclease domain) and said domain nicks both the to-be-edited strand and the non-edited strand. For example, in such an embodiment the endonuclease domain may be a CRISPR-associated endonuclease domain, and the template nucleic acid (e.g., template RNA) comprises a gRNA that directs nicking of the to-be-edited strand and an additional gRNA that directs nicking of the non-edited strand. In some embodiments, the polypeptide comprises a plurality of domains having endonuclease activity, and a first endonuclease domain nicks the to-be-edited strand and a second endonuclease domain nicks the non-edited strand (optionally, the first endonuclease domain does not (e.g., cannot) nick the non-edited strand and the second endonuclease domain does not (e.g., cannot) nick the to-be-edited strand).

[0192] In some embodiments, the endonuclease domain is capable of nicking a first strand and a second strand. In some embodiments, the first and second strand nicks occur at the same position in the target site but on opposite strands. In some embodiments, the second strand nick occurs in a staggered location, e.g., upstream or downstream, from the first nick. In some embodiments, the endonuclease domain generates a target site deletion if the second strand nick is upstream of the first strand nick. In some embodiments, the endonuclease domain generates a target site duplication if the second strand nick is downstream of the first strand nick. In some embodiments, the endonuclease domain generates no duplication and/or deletion if the first and second strand nicks occur in the same position of the target site (e.g., as described in Gladyshev and Arkhipova Gene 2009, incorporated by reference herein in its entirety). In some embodiments, the endonuclease domain has altered activity depending on protein conformation or RNA-binding status, e.g., which promotes the nicking of the first or second strand (e.g., as described in Christensen et al. PNAS 2006; incorporated by reference herein in its entirety).

[0193] In some embodiments, the endonuclease domain comprises a meganuclease, or a functional fragment thereof. In some embodiments, the endonuclease domain comprises a homing endonuclease, or a functional fragment thereof. In some embodiments, the endonuclease domain comprises a meganuclease from the LAGLIDADG (SEQ ID NO: 1594), GIY-YIG, HNH, His-Cys Box, or PD-(D/E) XK families, or a functional fragment or variant thereof, e.g., which possess conserved amino acid motifs, e.g., as indicated in the family names. In some embodiments, the endonuclease domain comprises a meganuclease, or fragment thereof, chosen from, e.g., I-SmaMI (Uniprot F7WD42), I-SceI (Uniprot P03882), I-Anil (Uniprot P03880), I-DmoI (Uniprot P21505), I-CreI (Uniprot P05725), I-TevI (Uniprot P13299), I-OnuI (Uniprot Q4VWW5), or I-BmoI (Uniprot Q9ANR6). In some embodiments, the meganuclease is naturally monomeric, e.g., I-SceI, I-TevI, or dimeric, e.g., I-CreI, in its functional form. For example, the LAGLIDADG (SEQ ID NO: 1594) meganucleases with a single copy of the LAGLIDADG (SEQ ID NO: 1594)motif generally form homodimers, whereas members with two copies of the LAGLIDADG (SEQ ID NO: 1594)motif are generally found as monomers. In some embodiments, a meganuclease that normally forms as a dimer is expressed as a fusion, e.g., the two subunits are expressed as a single ORF and, optionally, connected by a linker, e.g., an I-CreI dimer fusion (Rodriguez-Fornes et al. Gene Therapy 2020; incorporated by reference herein in its entirety). In some embodiments, a meganuclease, or a functional fragment thereof, is altered to favor nickase activity for one strand of a double-stranded DNA molecule, e.g., I-SceI (K122I and/or K223I) (Niu et al. J Mol Biol 2008), I-Anil (K227M) (McConnell Smith et al. PNAS 2009), I-DmoI (Q42A and/or K120M) (Molina et al. J Biol Chem 2015). In some embodiments, a meganuclease or functional fragment thereof possessing this preference for single-strand cleavage is used as an endonuclease domain, e.g., with nickase activity. In some embodiments, an endonuclease domain comprises a meganuclease, or a functional fragment thereof, which naturally targets or is engineered to target a safe harbor site, e.g., an I-CreI targeting SH6 site (Rodriguez-Fornes et al., supra). In some embodiments, an endonuclease domain comprises a meganuclease, or a functional fragment thereof, with a sequence tolerant catalytic domain, e.g., I-TevI recognizing the minimal motif CNNNG (Kleinstiver et al. PNAS 2012). In some embodiments, a target sequence tolerant catalytic domain is fused to a DNA binding domain, e.g., to direct activity, e.g., by fusing I-TevI to: (i) zinc fingers to create Tev-ZFEs (Kleinstiver et al. PNAS 2012), (ii) other meganucleases to create MegaTevs (Wolfs et al. Nucleic Acids Res 2014), and/or (iii) Cas9 to create TevCas9 (Wolfs et al. PNAS 2016).

[0194] In some embodiments, the endonuclease domain comprises a restriction enzyme, e.g., a Type IIS or Type IIP restriction enzyme. In some embodiments, the endonuclease domain comprises a Type IIS restriction enzyme, e.g., FokI, or a fragment or variant thereof. In some embodiments, the endonuclease domain comprises a Type IIP restriction enzyme, e.g., PvuII, or a fragment or variant thereof. In some embodiments, a dimeric restriction enzyme is expressed as a fusion such that it functions as a single chain, e.g., a FokI dimer fusion (Minczuk et al. Nucleic Acids Res 36(12):3926-3938 (2008)).

[0195] The use of additional endonuclease domains is described, for example, in Guha and Edgell Int J Mol Sci 18(22):2565 (2017), which is incorporated herein by reference in its entirety.

[0196] In some embodiments, an endonuclease domain or DNA binding domain (e.g., as described herein) comprises a Cas protein, e.g., a Streptococcuspyogenes Cas9 (SpCas9) or a functional fragment or variant thereof. In some embodiments, the endonuclease domain or DNA binding domain comprises a modified SpCas9. In embodiments, the modified SpCas9 comprises a modification that alters protospacer-adjacent motif (PAM) specificity. In embodiments, the PAM has specificity for the nucleic acid sequence 5′-NGT-3′. In embodiments, the modified SpCas9 comprises one or more amino acid substitutions, e.g., at one or more of positions L1111, D1135, G1218, E1219, A1322, of R1335, e.g., selected from L1111R, D1135V, G1218R, E1219F, A1322R, R1335V. In embodiments, the modified SpCas9 comprises the amino acid substitution T1337R and one or more additional amino acid substitutions, e.g., selected from L1111, D1135L, S1136R, G1218S, E1219V, D1332A, D1332S, D1332T, D1332V, D1332L, D1332K, D1332R, R1335Q, T1337, T1337L, T1337Q, T1337I, T1337V, T1337F, T1337S, T1337N, T1337K, T1337H, T1337Q, and T1337M, or corresponding amino acid substitutions thereto. In embodiments, the modified SpCas9 comprises: (i) one or more amino acid substitutions selected from D1135L, S1136R, G1218S, E1219V, A1322R, R1335Q, and T1337; and (ii) one or more amino acid substitutions selected from L1111R, G1218R, E1219F, D1332A, D1332S, D1332T, D1332V, D1332L, D1332K, D1332R, T1337L, T1337I, T1337V, T1337F, T1337S, T1337N, T1337K, T1337R, T1337H, T1337Q, and T1337M, or corresponding amino acid substitutions thereto.

[0197] In some embodiments, a Gene Writer may comprise a Cas protein as listed in Table 40. The predicted or validated nickase mutations for installing Nickase activity in the Cas protein as shown in Table 40, are based on the signature of the SpCas9(N863A) mutation. In some embodiments, system described herein comprises a GeneWriter protein of Table 3 and a Cas protein of Table 40 A. In some embodiments, a GeneWriter protein of Table 3 is fused to a Cas protein of Table 40 A.

TABLE 40A
CRISPR/Cas Proteins, Species, and Mutations

| | | | | SEQ |
|---|---|---|---|---|
| | Parental | | Nickase | ID |
| Variant | Host | Protein Sequence | Mutation | No. |
| Nme2Cas9 | Neisseria | MAAFKPNPINYILGLDIGIASVGWAMVEIDEEENPIRLIDLGVRVFERAEVPKTGDSLAMARRLAR | N611A | 1949 |
| | meningitidis | SVRRLTRRRAHRLLRARRLLKREGVLQAADFDENGLIKSLPNTPWQLRAAALDRKLTPLEWSAVLL | | |
| | | HLIKHRGYLSQRKNEGETADKELGALLKGVANNAHALQTGDFRTPAELALNKFEKESGHIRNQRGD | | |
| | | YSHTFSRKDLQAELILLFEKQKEFGNPHVSGGLKEGIETLLMTQRPALSGDAVQKMLGHCTFEPAE | | |
| | | PKAAKNTYTAERFIWLTKLNNLRILEQGSERPLTDTERATLMDEPYRKSKLTYAQARKLLGLEDTA | | |
| | | FFKGLRYGKDNAEASTLMEMKAYHAISRALEKEGLKDKKSPLNLSSELQDEIGTAFSLFKTDEDIT | | |
| | | GRLKDRVQPEILEALLKHISFDKFVQISLKALRRIVPLMEQGKRYDEACAEIYGDHYGKKNTEEKI | | |
| | | YLPPIPADEIRNPVVLRALSQARKVINGVVRRYGSPARIHIETAREVGKSFKDRKEIEKRQEENRK | | |
| | | DREKAAAKFREYFPNFVGEPKSKDILKLRLYEQQHGKCLYSGKEINLVRLNEKGYVEIDHALPFSR | | |
| | | TWDDSFNNKVLVLGSENQNKGNQTPYEYFNGKDNSREWQEFKARVETSRFPRSKKQRILLQKFDED | | |
| | | GFKECNLNDTRYVNRFLCQFVADHILLTGKGKRRVFASNGQITNLLRGFWGLRKVRAENDRHHALD | | |
| | | AVVVACSTVAMQQKITRFVRYKEMNAFDGKTIDKETGKVLHQKTHFPQPWEFFAQEVMIRVFGKPD | | |
| | | GKPEFEEADTPEKLRTLLAEKLSSRPEAVHEYVTPLFVSRAPNRKMSGAHKDTLRSAKRFVKHNEK | | |
| | | ISVKRVWLTEIKLADLENMVNYKNGREIELYEALKARLEAYGGNAKQAFDPKDNPFYKKGGQLVKA | | |
| | | VRVEKTQESGVLLNKKNAYTIADNGDMVRVDVFCKVDKKGKNQYFIVPIYAWQVAENILPDIDCKG | | |
| | | YRIDDSYTFCFSLHKYDLIAFQKDEKSKVEFAYYINCDSSNGRFYLAWHDKGSKEQQFRISTQNLV | | |
| | | LIQKYQVNELGKEIRPCRLKKRPPVR | | |
| PpnCas9 | Pasteurella | MQNNPLNYILGLDLGIASIGWAVVEIDEESSPIRLIDVGVRTFERAEVAKTGESLALSRRLARSSR | N605A | 1950 |
| | pneumotropica | RLIKRRAERLKKAKRLLKAEKILHSIDEKLPINVWQLRVKGLKEKLERQEWAAVLLHLSKHRGYLS | | |
| | | QRKNEGKSDNKELGALLSGIASNHQMLQSSEYRTPAEIAVKKFQVEEGHIRNQRGSYTHTFSRLDL | | |
| | | LAEMELLFQRQAELGNSYTSTTLLENLTALLMWQKPALAGDAILKMLGKCTFEPSEYKAAKNSYSA | | |
| | | ERFVWLTKLNNLRILENGTERALNDNERFALLEQPYEKSKLTYAQVRAMLALSDNAIFKGVRYLGE | | |
| | | DKKTVESKTTLIEMKFYHQIRKTLGSAELKKEWNELKGNSDLLDEIGTAFSLYKTDDDICRYLEGK | | |
| | | LPERVLNALLENLNFDKFIQLSLKALHQILPLMLQGQRYDEAVSAIYGDHYGKKSTETTRLLPTIP | | |
| | | ADEIRNPVVLRTLTQARKVINAVVRLYGSPARIHIETAREVGKSYQDRKKLEKQQEDNRKQRESAV | | |
| | | KKFKEMFPHFVGEPKGKDILKMRLYELQQAKCLYSGKSLELHRLLEKGYVEVDHALPFSRTWDDSF | | |
| | | NNKVLVLANENQNKGNLTPYEWLDGKNNSERWQHFVVRVQTSGFSYAKKQRILNHKLDEKGFIERN | | |
| | | LNDTRYVARFLCNFIADNMLLVGKGKRNVFASNGQITALLRHRWGLQKVREQNDRHHALDAVVVAC | | |
| | | STVAMQQKITRFVRYNEGNVFSGERIDRETGEIIPLHFPSPWAFFKENVEIRIFSENPKLELENRL | | |
| | | PDYPQYNHEWVQPLFVSRMPTRKMTGQGHMETVKSAKRLNEGLSVLKVPLTQLKLSDLERMVNRDR | | |
| | | EIALYESLKARLEQFGNDPAKAFAEPFYKKGGALVKAVRLEQTQKSGVLVRDGNGVADNASMVRVD | | |
| | | VFTKGGKYFLVPIYTWQVAKGILPNRAATQGKDENDWDIMDEMATFQFSLCQNDLIKLVTKKKTIF | | |
| | | GYFNGLNRATSNINIKEHDLDKSKGKLGIYLEVGVKLAISLEKYQVDELGKNIRPCRPTKRQHVR | | |
| SauCas9 | Staphyl- | MKRNYILGLDIGITSVGYGIIDYETRDVIDAGVRLFKEANVENNEGRRSKRGARRLKRRRRHRIQR | N580A | 1951 |
| | ococcus | VKKLLFDYNLLTDHSELSGINPYEARVKGLSQKLSEEEFSAALLHLAKRRGVHNVNEVEEDTGNEL | | |
| | aureus | STKEQISRNSKALEEKYVAELQLERLKKDGEVRGSINRFKTSDYVKEAKQLLKVQKAYHQLDQSFI | | |
| | | DTYIDLLETRRTYYEGPGEGSPFGWKDIKEWYEMLMGHCTYFPEELRSVKYAYNADLYNALNDLNN | | |
| | | LVITRDENEKLEYYEKFQIIENVFKQKKKPTLKQIAKEILVNEEDIKGYRVTSTGKPEFTNLKVYH | | |
| | | DIKDITARKEIIENAELLDQIAKILTIYQSSEDIQEELTNLNSELTQEEIEQISNLKGYTGTHNLS | | |
| | | LKAINLILDELWHTNDNQIAIFNRLKLVPKKVDLSQQKEIPTTLVDDFILSPVVKRSFIQSIKVIN | | |
| | | AIIKKYGLPNDIIIELAREKNSKDAQKMINEMQKRNRQTNERIEEIIRTTGKENAKYLIEKIKLHD | | |
| | | MQEGKCLYSLEAIPLEDLLNNPFNYEVDHIIPRSVSFDNSFNNKVLVKQEENSKKGNRTPFQYLSS | | |
| | | SDSKISYETFKKHILNLAKGKGRISKTKKEYLLEERDINRFSVQKDFINRNLVDTRYATRGLMNLL | | |
| | | RSYFRVNNLDVKVKSINGGFTSFLRRKWKFKKERNKGYKHHAEDALIIANADFIFKEWKKLDKAKK | | |
| | | VMENQMFEEKQAESMPEIETEQEYKEIFITPHQIKHIKDFKDYKYSHRVDKKPNRELINDTLYSTR | | |
| | | KDDKGNTLIVNNLNGLYDKDNDKLKKLINKSPEKLLMYHHDPQTYQKLKLIMEQYGDEKNPLYKYY | | |
| | | EETGNYLTKYSKKDNGPVIKKIKYYGNKLNAHLDITDDYPNSRNKVVKLSLKPYRFDVYLDNGVYK | | |
| | | FVTVKNLDVIKKENYYEVNSKCYEEAKKLKKISNQAEFIASFYNNDLIKINGELYRVIGVNNDLLN | | |
| | | RIEVNMIDITYREYLENMNDKRPPRIIKTIASKTQSIKKYSTDILGNLYEVKSKKHPQIIKKG | | |
| SauCas9- | Staphyl- | MKRNYILGLDIGITSVGYGIIDYETRDVIDAGVRLFKEANVENNEGRRSKRGARRLKRRRRHRIQR | N580A | 1952 |
| KKH | ococcus | VKKLLFDYNLLTDHSELSGINPYEARVKGLSQKLSEEEFSAALLHLAKRRGVHNVNEVEEDTGNEL | | |
| | aureus | STKEQISRNSKALEEKYVAELQLERLKKDGEVRGSINRFKTSDYVKEAKQLLKVQKAYHQLDQSFI | | |
| | | DTYIDLLETRRTYYEGPGEGSPFGWKDIKEWYEMLMGHCTYFPEELRSVKYAYNADLYNALNDLNN | | |
| | | LVITRDENEKLEYYEKFQIIENVFKQKKKPTLKQIAKEILVNEEDIKGYRVTSTGKPEFTNLKVYH | | |
| | | DIKDITARKEIIENAELLDQIAKILTIYQSSEDIQEELTNLNSELTQEEIEQISNLKGYTGTHNLS | | |
| | | LKAINLILDELWHTNDNQIAIFNRLKLVPKKVDLSQQKEIPTTLVDDFILSPVVKRSFIQSIKVIN | | |
| | | AIIKKYGLPNDIIIELAREKNSKDAQKMINEMQKRNRQTNERIEEIIRTTGKENAKYLIEKIKLHD | | |
| | | MQEGKCLYSLEAIPLEDLLNNPFNYEVDHIIPRSVSFDNSFNNKVLVKQEENSKKGNRTPFQYLSS | | |
| | | SDSKISYETFKKHILNLAKGKGRISKTKKEYLLEERDINRFSVQKDFINRNLVDTRYATRGLMNLL | | |
| | | RSYFRVNNLDVKVKSINGGFTSFLRRKWKFKKERNKGYKHHAEDALIIANADFIFKEWKKLDKAKK | | |
| | | VMENQMFEEKQAESMPEIETEQEYKEIFITPHQIKHIKDFKDYKYSHRVDKKPNRKLINDTLYSTR | | |
| | | KDDKGNTLIVNNLNGLYDKDNDKLKKLINKSPEKLLMYHHDPQTYQKLKLIMEQYGDEKNPLYKYY | | |
| | | EETGNYLTKYSKKDNGPVIKKIKYYGNKLNAHLDITDDYPNSRNKVVKLSLKPYRFDVYLDNGVYK | | |
| | | FVTVKNLDVIKKENYYEVNSKCYEEAKKLKKISNQAEFIASFYKNDLIKINGELYRVIGVNNDLLN | | |
| | | RIEVNMIDITYREYLENMNDKRPPHIIKTIASKTQSIKKYSTDILGNLYEVKSKKHPQIIKKG | | |
| SauriCas9 | Staphyl- | MQENQQKQNYILGLDIGITSVGYGLIDSKTREVIDAGVRLFPEADSENNSNRRSKRGARRLKRRRI | N588A | 1953 |
| | ococcus | HRLNRVKDLLADYQMIDLNNVPKSTDPYTIRVKGLREPLTKEEFAIALLHIAKRRGLHNISVSMGD | | |
| | auricularis | EEQDNELSTKQQLQKNAQQLQDKYVCELQLERLTNINKVRGEKNRFKTEDFVKEVKQLCETQRQYH | | |
| | | NIDDQFIQQYIDLVSTRREYFEGPGNGSPYGWDGDLLKWYEKLMGRCTYFPEELRSVKYAYSADLF | | |
| | | NALNDLNNLVVTRDDNPKLEYYEKYHIIENVFKQKKNPTLKQIAKEIGVQDYDIRGYRITKSGKPQ | | |
| | | FTSFKLYHDLKNIFEQAKYLEDVEMLDEIAKILTIYQDEISIKKALDQLPELLTESEKSQIAQLTG | | |
| | | YTGTHRLSLKCIHIVIDELWESPENQMEIFTRLNLKPKKVEMSEIDSIPTTLVDEFILSPVVKRAF | | |
| | | IQSIKVINAVINRFGLPEDIIIELAREKNSKDRRKFINKLQKQNEATRKKIEQLLAKYGNTNAKYM | | |
| | | IEKIKLHDMQEGKCLYSLEAIPLEDLLSNPTHYEVDHIIPRSVSFDNSLNNKVLVKQSENSKKGNR | | |
| | | TPYQYLSSNESKISYNQFKQHILNLSKAKDRISKKKRDMLLEERDINKFEVQKEFINRNLVDTRYA | | |
| | | TRELSNLLKTYFSTHDYAVKVKTINGGFTNHLRKVWDFKKHRNHGYKHHAEDALVIANADFLFKTH | | |
| | | KALRRTDKILEQPGLEVNDTTVKVDTEEKYQELFETPKQVKNIKQFRDFKYSHRVDKKPNRQLIND | | |
| | | TLYSTREIDGETYVVQTLKDLYAKDNEKVKKLFTERPQKILMYQHDPKTFEKLMTILNQYAEAKNP | | |
| | | LAAYYEDKGEYVTKYAKKGNGPAIHKIKYIDKKLGSYLDVSNKYPETQNKLVKLSLKSFRFDIYKC | | |
| | | EQGYKMVSIGYLDVLKKDNYYYIPKDKYEAEKQKKKIKESDLFVGSFYYNDLIMYEDELFRVIGVN | | |
| | | SDINNLVELNMVDITYKDFCEVNNVTGEKRIKKTIGKRVVLIEKYTTDILGNLYKTPLPKKPQLIF | | |
| | | KRGEL | | |
| SauriCas9- | Staphyl- | MQENQQKQNYILGLDIGITSVGYGLIDSKTREVIDAGVRLFPEADSENNSNRRSKRGARRLKRRRI | N588A | 1954 |
| KKH | ococcus | HRLNRVKDLLADYQMIDLNNVPKSTDPYTIRVKGLREPLTKEEFAIALLHIAKRRGLHNISVSMGD | | |
| | auricularis | EEQDNELSTKQQLQKNAQQLQDKYVCELQLERLTNINKVRGEKNRFKTEDFVKEVKQLCETQRQYH | | |
| | | NIDDQFIQQYIDLVSTRREYFEGPGNGSPYGWDGDLLKWYEKLMGRCTYFPEELRSVKYAYSADLF | | |
| | | NALNDLNNLVVTRDDNPKLEYYEKYHIIENVFKQKKNPTLKQIAKEIGVQDYDIRGYRITKSGKPQ | | |
| | | FTSFKLYHDLKNIFEQAKYLEDVEMLDEIAKILTIYQDEISIKKALDQLPELLTESEKSQIAQLTG | | |
| | | YTGTHRLSLKCIHIVIDELWESPENQMEIFTRLNLKPKKVEMSEIDSIPTTLVDEFILSPVVKRAF | | |
| | | IQSIKVINAVINRFGLPEDIIIELAREKNSKDRRKFINKLQKQNEATRKKIEQLLAKYGNTNAKYM | | |
| | | IEKIKLHDMQEGKCLYSLEAIPLEDLLSNPTHYEVDHIIPRSVSFDNSLNNKVLVKQSENSKKGNR | | |
| | | TPYQYLSSNESKISYNQFKQHILNLSKAKDRISKKKRDMLLEERDINKFEVQKEFINRNLVDTRYA | | |
| | | TRELSNLLKTYFSTHDYAVKVKTINGGFTNHLRKVWDFKKHRNHGYKHHAEDALVIANADFLFKTH | | |
| | | KALRRTDKILEQPGLEVNDTTVKVDTEEKYQELFETPKQVKNIKQFRDFKYSHRVDKKPNRKLIND | | |
| | | TLYSTREIDGETYVVQTLKDLYAKDNEKVKKLFTERPQKILMYQHDPKTFEKLMTILNQYAEAKNP | | |
| | | LAAYYEDKGEYVTKYAKKGNGPAIHKIKYIDKKLGSYLDVSNKYPETQNKLVKLSLKSFRFDIYKC | | |
| | | EQGYKMVSIGYLDVLKKDNYYYIPKDKYEAEKQKKKIKESDLFVGSFYKNDLIMYEDELFRVIGVN | | |
| | | SDINNLVELNMVDITYKDFCEVNNVTGEKHIKKTIGKRVVLIEKYTTDILGNLYKTPLPKKPQLIF | | |
| | | KRGEL | | |
| ScaCas9- | Strepto- | MEKKYSIGLDIGTNSVGWAVITDDYKVPSKKFKVLGNTNRKSIKKNLMGALLFDSGETAEATRLKR | N872A | 1955 |
| Sc++ | coccus | TARRRYTRRKNRIRYLQEIFANEMAKLDDSFFQRLEESFLVEEDKKNERHPIFGNLADEVAYHRNY | | |
| | canis | PTIYHLRKKLADSPEKADLRLIYLALAHIIKFRGHFLIEGKLNAENSDVAKLFYQLIQTYNQLFEE | | |
| | | SPLDEIEVDAKGILSARLSKSKRLEKLIAVFPNEKKNGLFGNIIALALGLTPNFKSNFDLTEDAKL | | |
| | | QLSKDTYDDDLDELLGQIGDQYADLFSAAKNLSDAILLSDILRSNSEVTKAPLSASMVKRYDEHHQ | | |
| | | DLALLKTLVRQQFPEKYAEIFKDDTKNGYAGYVGADKKLRKRSGKLATEEEFYKFIKPILEKMDGA | | |
| | | EELLAKLNRDDLLRKQRTFDNGSIPHQIHLKELHAILRRQEEFYPFLKENREKIEKILTFRIPYYV | | |
| | | GPLARGNSRFAWLTRKSEEAITPWNFEEVVDKGASAQSFIERMTNFDEQLPNKKVLPKHSLLYEYF | | |
| | | TVYNELTKVKYVTERMRKPEFLSGEQKKAIVDLLFKTNRKVTVKQLKEDYFKKIECFDSVEIIGVE | | |
| | | DRFNASLGTYHDLLKIIKDKDFLDNEENEDILEDIVLTLTLFEDREMIEERLKTYAHLFDDKVMKQ | | |
| | | LKRRHYTGWGRLSRKMINGIRDKQSGKTILDFLKSDGFSNRNFMQLIHDDSLTFKEEIEKAQVSGQ | | |
| | | GDSLHEQIADLAGSPAIKKGILQTVKIVDELVKVMGHKPENIVIEMARENQTTTKGLQQSRERKKR | | |
| | | IEEGIKELESQILKENPVENTQLQNEKLYLYYLQNGRDMYVDQELDINRLSDYDVDHIVPQSFIKD | | |
| | | DSIDNKVLTRSVENRGKSDNVPSEEVVKKMKNYWRQLLNAKLITQRKFDNLTKAERGGLSEADKAG | | |
| | | FIKRQLVETRQITKHVARILDSRMNTKRDKNDKPIREVKVITLKSKLVSDFRKDFQLYKVRDINNY | | |
| | | HHAHDAYLNAVVGTALIKKYPKLESEFVYGDYKVYDVRKMIAKSEQEIGKATAKRFFYSNIMNFFK | | |
| | | TEVKLANGEIRKRPLIETNGETGEVVWNKEKDFATVRKVLAMPQVNIVKKTEVQTGGFSKESILSK | | |
| | | RESAKLIPRKKGWDTRKYGGFGSPTVAYSILVVAKVEKGKAKKLKSVKVLVGITIMEKGSYEKDPI | | |
| | | GFLEAKGYKDIKKELIFKLPKYSLFELENGRRRMLASAKELQKANELVLPQHLVRLLYYTQNISAT | | |
| | | TGSNNLGYIEQHREEFKEIFEKIIDFSEKYILKNKVNSNLKSSFDEQFAVSDSILLSNSFVSLLKY | | |
| | | TSFGASGGFTFLDLDVKQGRLRYQTVTEVLDATLIYQSITGLYETRTDLSQLGGD | | |
| SpyCas9 | Strepto- | MDKKYSIGLDIGTNSVGWAVITDEYKVPSKKFKVLGNTDRHSIKKNLIGALLFDSGETAEATRLKR | N863A | 1956 |
| | coccus | TARRRYTRRKNRICYLQEIFSNEMAKVDDSFFHRLEESFLVEEDKKHERHPIFGNIVDEVAYHEKY | | |
| | pyogenes | PTIYHLRKKLVDSTDKADLRLIYLALAHMIKFRGHFLIEGDLNPDNSDVDKLFIQLVQTYNQLFEE | | |
| | | NPINASGVDAKAILSARLSKSRRLENLIAQLPGEKKNGLFGNLIALSLGLTPNFKSNFDLAEDAKL | | |
| | | QLSKDTYDDDLDNLLAQIGDQYADLFLAAKNLSDAILLSDILRVNTEITKAPLSASMIKRYDEHHQ | | |
| | | DLTLLKALVRQQLPEKYKEIFFDQSKNGYAGYIDGGASQEEFYKFIKPILEKMDGTEELLVKLNRE | | |
| | | DLLRKQRTFDNGSIPHQIHLGELHAILRRQEDFYPFLKDNREKIEKILTFRIPYYVGPLARGNSRF | | |
| | | AWMTRKSEETITPWNFEEVVDKGASAQSFIERMTNFDKNLPNEKVLPKHSLLYEYFTVYNELTKVK | | |
| | | YVTEGMRKPAFLSGEQKKAIVDLLFKTNRKVTVKQLKEDYFKKIECFDSVEISGVEDRFNASLGTY | | |
| | | HDLLKIIKDKDFLDNEENEDILEDIVLTLTLFEDREMIEERLKTYAHLFDDKVMKQLKRRRYTGWG | | |
| | | RLSRKLINGIRDKQSGKTILDFLKSDGFANRNFMQLIHDDSLTFKEDIQKAQVSGQGDSLHEHIAN | | |
| | | LAGSPAIKKGILQTVKVVDELVKVMGRHKPENIVIEMARENQTTQKGQKNSRERMKRIEEGIKELG | | |
| | | SQILKEHPVENTQLQNEKLYLYYLQNGRDMYVDQELDINRLSDYDVDHIVPQSFLKDDSIDNKVLT | | |
| | | RSDKNRGKSDNVPSEEVVKKMKNYWRQLLNAKLITQRKFDNLTKAERGGLSELDKAGFIKRQLVET | | |
| | | RQITKHVAQILDSRMNTKYDENDKLIREVKVITLKSKLVSDFRKDFQFYKVREINNYHHAHDAYLN | | |
| | | AVVGTALIKKYPKLESEFVYGDYKVYDVRKMIAKSEQEIGKATAKYFFYSNIMNFFKTEITLANGE | | |
| | | IRKRPLIETNGETGEIVWDKGRDFATVRKVLSMPQVNIVKKTEVQTGGFSKESILPKRNSDKLIAR | | |
| | | KKDWDPKKYGGFDSPTVAYSVLVVAKVEKGKSKKLKSVKELLGITIMERSSFEKNPIDFLEAKGYK | | |
| | | EVKKDLIIKLPKYSLFELENGRKRMLASAGELQKGNELALPSKYVNFLYLASHYEKLKGSPEDNEQ | | |
| | | KQLFVEQHKHYLDEIIEQISEFSKRVILADANLDKVLSAYNKHRDKPIREQAENIIHLFTLTNLGA | | |
| | | PAAFKYFDTTIDRKRYTSTKEVLDATLIHQSITGLYETRIDLSQLGGD | | |
| SpyCas9- | Strepto- | MDKKYSIGLDIGTNSVGWAVITDEYKVPSKKFKVLGNTDRHSIKKNLIGALLFDSGETAEATRLKR | N863A | 1957 |
| NG | coccus | TARRRYTRRKNRICYLQEIFSNEMAKVDDSFFHRLEESFLVEEDKKHERHPIFGNIVDEVAYHEKY | | |
| | pyogenes | PTIYHLRKKLVDSTDKADLRLIYLALAHMIKFRGHFLIEGDLNPDNSDVDKLFIQLVQTYNQLFEE | | |
| | | NPINASGVDAKAILSARLSKSRRLENLIAQLPGEKKNGLFGNLIALSLGLTPNFKSNFDLAEDAKL | | |
| | | QLSKDTYDDDLDNLLAQIGDQYADLFLAAKNLSDAILLSDILRVNTEITKAPLSASMIKRYDEHHQ | | |
| | | DLTLLKALVRQQLPEKYKEIFFDQSKNGYAGYIDGGASQEEFYKFIKPILEKMDGTEELLVKLNRE | | |
| | | DLLRKQRTFDNGSIPHQIHLGELHAILRRQEDFYPFLKDNREKIEKILTFRIPYYVGPLARGNSRF | | |
| | | AWMTRKSEETITPWNFEEVVDKGASAQSFIERMTNFDKNLPNEKVLPKHSLLYEYFTVYNELTKVK | | |
| | | YVTEGMRKPAFLSGEQKKAIVDLLFKTNRKVTVKQLKEDYFKKIECFDSVEISGVEDRFNASLGTY | | |
| | | HDLLKIIKDKDFLDNEENEDILEDIVLTLTLFEDREMIEERLKTYAHLFDDKVMKQLKRRRYTGWG | | |
| | | RLSRKLINGIRDKQSGKTILDFLKSDGFANRNFMQLIHDDSLTFKEDIQKAQVSGQGDSLHEHIAN | | |
| | | LAGSPAIKKGILQTVKVVDELVKVMGRHKPENIVIEMARENQTTQKGQKNSRERMKRIEEGIKELG | | |
| | | SQILKEHPVENTQLQNEKLYLYYLQNGRDMYVDQELDINRLSDYDVDHIVPQSFLKDDSIDNKVLT | | |
| | | RSDKNRGKSDNVPSEEVVKKMKNYWRQLLNAKLITQRKFDNLTKAERGGLSELDKAGFIKRQLVET | | |
| | | RQITKHVAQILDSRMNTKYDENDKLIREVKVITLKSKLVSDFRKDFQFYKVREINNYHHAHDAYLN | | |
| | | AVVGTALIKKYPKLESEFVYGDYKVYDVRKMIAKSEQEIGKATAKYFFYSNIMNFFKTEITLANGE | | |
| | | IRKRPLIETNGETGEIVWDKGRDFATVRKVLSMPQVNIVKKTEVQTGGFSKESIRPKRNSDKLIAR | | |
| | | KKDWDPKKYGGFVSPTVAYSVLVVAKVEKGKSKKLKSVKELLGITIMERSSFEKNPIDFLEAKGYK | | |
| | | EVKKDLIIKLPKYSLFELENGRKRMLASARFLQKGNELALPSKYVNFLYLASHYEKLKGSPEDNEQ | | |
| | | KQLFVEQHKHYLDEIIEQISEFSKRVILADANLDKVLSAYNKHRDKPIREQAENIIHLFTLTNLGA | | |
| | | PRAFKYFDTTIDRKVYRSTKEVLDATLIHQSITGLYETRIDLSQLGGD | | |
| SpyCas9- | Strepto- | MDKKYSIGLDIGTNSVGWAVITDEYKVPSKKFKVLGNTDRHSIKKNLIGALLFDSGETAERTRLKR | N863A | 1958 |
| SpRY | coccus | TARRRYTRRKNRICYLQEIFSNEMAKVDDSFFHRLEESFLVEEDKKHERHPIFGNIVDEVAYHEKY | | |
| | pyogenes | PTIYHLRKKLVDSTDKADLRLIYLALAHMIKFRGHFLIEGDLNPDNSDVDKLFIQLVQTYNQLFEE | | |
| | | NPINASGVDAKAILSARLSKSRRLENLIAQLPGEKKNGLFGNLIALSLGLTPNFKSNFDLAEDAKL | | |
| | | QLSKDTYDDDLDNLLAQIGDQYADLFLAAKNLSDAILLSDILRVNTEITKAPLSASMIKRYDEHHQ | | |
| | | DLTLLKALVRQQLPEKYKEIFFDQSKNGYAGYIDGGASQEEFYKFIKPILEKMDGTEELLVKLNRE | | |
| | | DLLRKQRTFDNGSIPHQIHLGELHAILRRQEDFYPFLKDNREKIEKILTFRIPYYVGPLARGNSRF | | |
| | | AWMTRKSEETITPWNFEEVVDKGASAQSFIERMTNFDKNLPNEKVLPKHSLLYEYFTVYNELTKVK | | |
| | | YVTEGMRKPAFLSGEQKKAIVDLLFKTNRKVTVKQLKEDYFKKIECFDSVEISGVEDRFNASLGTY | | |
| | | HDLLKIIKDKDFLDNEENEDILEDIVLTLTLFEDREMIEERLKTYAHLFDDKVMKQLKRRRYTGWG | | |
| | | RLSRKLINGIRDKQSGKTILDFLKSDGFANRNFMQLIHDDSLTFKEDIQKAQVSGQGDSLHEHIAN | | |
| | | LAGSPAIKKGILQTVKVVDELVKVMGRHKPENIVIEMARENQTTQKGQKNSRERMKRIEEGIKELG | | |
| | | SQILKEHPVENTQLQNEKLYLYYLQNGRDMYVDQELDINRLSDYDVDHIVPQSFLKDDSIDNKVLT | | |
| | | RSDKNRGKSDNVPSEEVVKKMKNYWRQLLNAKLITQRKFDNLTKAERGGLSELDKAGFIKRQLVET | | |
| | | RQITKHVAQILDSRMNTKYDENDKLIREVKVITLKSKLVSDFRKDFQFYKVREINNYHHAHDAYLN | | |
| | | AVVGTALIKKYPKLESEFVYGDYKVYDVRKMIAKSEQEIGKATAKYFFYSNIMNFFKTEITLANGE | | |
| | | IRKRPLIETNGETGEIVWDKGRDFATVRKVLSMPQVNIVKKTEVQTGGFSKESIRPKRNSDKLIAR | | |
| | | KKDWDPKKYGGFLWPTVAYSVLVVAKVEKGKSKKLKSVKELLGITIMERSSFEKNPIDFLEAKGYK | | |
| | | EVKKDLIIKLPKYSLFELENGRKRMLASAKQLQKGNELALPSKYVNFLYLASHYEKLKGSPEDNEQ | | |
| | | KQLFVEQHKHYLDEIIEQISEFSKRVILADANLDKVLSAYNKHRDKPIREQAENIIHLFTLTRLGA | | |
| | | PRAFKYFDTTIDPKQYRSTKEVLDATLIHQSITGLYETRIDLSQLGGD | | |
| St1Cas9 | Strepto- | MSDLVLGLDIGIGSVGVGILNKVTGEIIHKNSRIFPAAQAENNLVRRTNRQGRRLARRKKHRRVRL | N622A | 1959 |
| | coccus | NRLFEESGLITDFTKISINLNPYQLRVKGLTDELSNEELFIALKNMVKHRGISYLDDASDDGNSSV | | |
| | thermophilus | GDYAQIVKENSKQLETKTPGQIQLERYQTYGQLRGDFTVEKDGKKHRLINVFPTSAYRSEALRILQ | | |
| | | TQQEFNPQITDEFINRYLEILTGKRKYYHGPGNEKSRTDYGRYRTSGETLDNIFGILIGKCTFYPD | | |
| | | EFRAAKASYTAQEFNLLNDLNNLTVPTETKKLSKEQKNQIINYVKNEKAMGPAKLFKYIAKLLSCD | | |
| | | VADIKGYRIDKSGKAEIHTFEAYRKMKTLETLDIEQMDRETLDKLAYVLTLNTEREGIQEALEHEF | | |
| | | ADGSFSQKQVDELVQFRKANSSIFGKGWHNFSVKLMMELIPELYETSEEQMTILTRLGKQKTTSSS | | |
| | | NKTKYIDEKLLTEEIYNPVVAKSVRQAIKIVNAAIKEYGDFDNIVIEMARETNEDDEKKAIQKIQK | | |
| | | ANKDEKDAAMLKAANQYNGKAELPHSVFHGHKQLATKIRLWHQQGERCLYTGKTISIHDLINNSNQ | | |
| | | FEVDHILPLSITFDDSLANKVLVYATANQEKGQRTPYQALDSMDDAWSFRELKAFVRESKTLSNKK | | |
| | | KEYLLTEEDISKFDVRKKFIERNLVDTRYASRVVLNALQEHFRAHKIDTKVSVVRGQFTSQLRRHW | | |
| | | GIEKTRDTYHHHAVDALIIAASSQLNLWKKQKNTLVSYSEDQLLDIETGELISDDEYKESVFKAPY | | |
| | | QHFVDTLKSKEFEDSILFSYQVDSKFNRKISDATIYATRQAKVGKDKADETYVLGKIKDIYTQDGY | | |
| | | DAFMKIYKKDKSKFLMYRHDPQTFEKVIEPILENYPNKQINEKGKEVPCNPFLKYKEEHGYIRKYS | | |
| | | KKGNGPEIKSLKYYDSKLGNHIDITPKDSNNKVVLQSVSPWRADVYFNKTTGKYEILGLKYADLQF | | |
| | | EKGTGTYKISQEKYNDIKKKEGVDSDSEFKFTLYKNDLLLVKDTETKEQQLFRFLSRTMPKQKHYV | | |
| | | ELKPYDKQKFEGGEALIKVLGNVANSGQCKKGLGKSNISIYKVRTDVLGNQHIIKNEGDKPKLDF | | |
| BlatCas9 | Brevibacillus | MAYTMGIDVGIASCGWAIVDLERQRIIDIGVRTFEKAENPKNGEALAVPRREARSSRRRLRRKKHR | N607A | 1960 |
| | laterosporus | IERLKHMFVRNGLAVDIQHLEQTLRSQNEIDVWQLRVDGLDRMLTQKEWLRVLIHLAQRRGFQSNR | | |
| | | KTDGSSEDGQVLVNVTENDRLMEEKDYRTVAEMMVKDEKFSDHKRNKNGNYHGVVSRSSLLVEIHT | | |
| | | LFETQRQHHNSLASKDFELEYVNIWSAQRPVATKDQIEKMIGTCTFLPKEKRAPKASWHFQYFMLL | | |
| | | QTINHIRITNVQGTRSLNKEEIEQVVNMALTKSKVSYHDTRKILDLSEEYQFVGLDYGKEDEKKKV | | |
| | | ESKETIIKLDDYHKLNKIFNEVELAKGETWEADDYDTVAYALTFFKDDEDIRDYLQNKYKDSKNRL | | |
| | | VKNLANKEYTNELIGKVSTLSFRKVGHLSLKALRKIIPFLEQGMTYDKACQAAGFDFQGISKKKRS | | |
| | | VVLPVIDQISNPVVNRALTQTRKVINALIKKYGSPETIHIETARELSKTFDERKNITKDYKENRDK | | |
| | | NEHAKKHLSELGIINPTGLDIVKYKLWCEQQGRCMYSNQPISFERLKESGYTEVDHIIPYSRSMND | | |
| | | SYNNRVLVMTRENREKGNQTPFEYMGNDTQRWYEFEQRVTTNPQIKKEKRQNLLLKGFTNRRELEM | | |
| | | LERNLNDTRYITKYLSHFISTNLEFSPSDKKKKVVNTSGRITSHLRSRWGLEKNRGQNDLHHAMDA | | |
| | | IVIAVTSDSFIQQVTNYYKRKERRELNGDDKFPLPWKFFREEVIARLSPNPKEQIEALPNHFYSED | | |
| | | ELADLQPIFVSRMPKRSITGEAHQAQFRRVVGKTKEGKNITAKKTALVDISYDKNGDFNMYGRETD | | |
| | | PATYEAIKERYLEFGGNVKKAFSTDLHKPKKDGTKGPLIKSVRIMENKTLVHPVNKGKGVVYNSSI | | |
| | | VRTDVFQRKEKYYLLPVYVTDVTKGKLPNKVIVAKKGYHDWIEVDDSFTFLFSLYPNDLIFIRQNP | | |
| | | KKKISLKKRIESHSISDSKEVQEIHAYYKGVDSSTAAIEFIIHDGSYYAKGVGVQNLDCFEKYQVD | | |
| | | ILGNYFKVKGEKRLELETSDSNHKGKDVNSIKSTSR | | |
| cCas9- | Staphyl- | MKRNYILGLDIGITSVGYGIIDYETRDVIDAGVRLFKEANVENNEGRRSKRGARRLKRRRRHRIQR | N580A | 1961 |
| vl6 | ococcus | VKKLLFDYNLLTDHSELSGINPYEARVKGLSQKLSEEEFSAALLHLAKRRGVHNVNEVEEDTGNEL | | |
| | aureus | STKEQISRNSKALEEKYVAELQLERLKKDGEVRGSINRFKTSDYVKEAKQLLKVQKAYHQLDQSFI | | |
| | | DTYIDLLETRRTYYEGPGEGSPFGWKDIKEWYEMLMGHCTYFPEELRSVKYAYNADLYNALNDLNN | | |
| | | LVITRDENEKLEYYEKFQIIENVFKQKKKPTLKQIAKEILVNEEDIKGYRVTSTGKPEFTNLKVYH | | |
| | | DIKDITARKEIIENAELLDQIAKILTIYQSSEDIQEELTNLNSELTQEEIEQISNLKGYTGTHNLS | | |
| | | LKAINLILDELWHTNDNQIAIFNRLKLVPKKVDLSQQKEIPTTLVDDFILSPVVKRSFIQSIKVIN | | |
| | | AIIKKYGLPNDIIIELAREKNSKDAQKMINEMQKRNRQTNERIEEIIRTTGKENAKYLIEKIKLHD | | |
| | | MQEGKCLYSLEAIPLEDLLNNPFNYEVDHIIPRSVSFDNSFNNKVLVKQEENSKKGNRTPFQYLSS | | |
| | | SDSKISYETFKKHILNLAKGKGRISKTKKEYLLEERDINRFSVQKDFINRNLVDTRYATRGLMNLL | | |
| | | RSYFRVNNLDVKVKSINGGFTSFLRRKWKFKKERNKGYKHHAEDALIIANADFIFKEWKKLDKAKK | | |
| | | VMENQMFEEKQAESMPEIETEQEYKEIFITPHQIKHIKDFKDYKYSHRVDKKPNRKLINDTLYSTR | | |
| | | KDDKGNTLIVNNLNGLYDKDNDKLKKLINKSPEKLLMYHHDPQTYQKLKLIMEQYGDEKNPLYKYY | | |
| | | EETGNYLTKYSKKDNGPVIKKIKYYGNKLNAHLDITDDYPNSRNKVVKLSLKPYRFDVYLDNGVYK | | |
| | | FVTVKNLDVIKKENYYEVNSKCYEEAKKLKKISNQAEFIASFYKNDLIKINGELYRVIGVNSDKNN | | |
| | | LIEVNMIDITYREYLENMNDKRPPHIIKTIASKTQSIKKYSTDILGNLYEVKSKKHPQIIKKG | | |
| cCas9- | Staphyl- | MKRNYILGLDIGITSVGYGIIDYETRDVIDAGVRLFKEANVENNEGRRSKRGARRLKRRRRHRIQR | N580A | 1962 |
| V17 | ococcus | VKKLLFDYNLLTDHSELSGINPYEARVKGLSQKLSEEEFSAALLHLAKRRGVHNVNEVEEDTGNEL | | |
| | aureus | STKEQISRNSKALEEKYVAELQLERLKKDGEVRGSINRFKTSDYVKEAKQLLKVQKAYHQLDQSFI | | |
| | | DTYIDLLETRRTYYEGPGEGSPFGWKDIKEWYEMLMGHCTYFPEELRSVKYAYNADLYNALNDLNN | | |
| | | LVITRDENEKLEYYEKFQIIENVFKQKKKPTLKQIAKEILVNEEDIKGYRVTSTGKPEFTNLKVYH | | |
| | | DIKDITARKEIIENAELLDQIAKILTIYQSSEDIQEELTNLNSELTQEEIEQISNLKGYTGTHNLS | | |
| | | LKAINLILDELWHTNDNQIAIFNRLKLVPKKVDLSQQKEIPTTLVDDFILSPVVKRSFIQSIKVIN | | |
| | | AIIKKYGLPNDIIIELAREKNSKDAQKMINEMQKRNRQTNERIEEIIRTTGKENAKYLIEKIKLHD | | |
| | | MQEGKCLYSLEAIPLEDLLNNPFNYEVDHIIPRSVSFDNSFNNKVLVKQEENSKKGNRTPFQYLSS | | |
| | | SDSKISYETFKKHILNLAKGKGRISKTKKEYLLEERDINRFSVQKDFINRNLVDTRYATRGLMNLL | | |
| | | RSYFRVNNLDVKVKSINGGFTSFLRRKWKFKKERNKGYKHHAEDALIIANADFIFKEWKKLDKAKK | | |
| | | VMENQMFEEKQAESMPEIETEQEYKEIFITPHQIKHIKDFKDYKYSHRVDKKPNRKLINDTLYSTR | | |
| | | KDDKGNTLIVNNLNGLYDKDNDKLKKLINKSPEKLLMYHHDPQTYQKLKLIMEQYGDEKNPLYKYY | | |
| | | EETGNYLTKYSKKDNGPVIKKIKYYGNKLNAHLDITDDYPNSRNKVVKLSLKPYRFDVYLDNGVYK | | |
| | | FVTVKNLDVIKKENYYEVNSKCYEEAKKLKKISNQAEFIASFYKNDLIKINGELYRVIGVNNSTRN | | |
| | | IVELNMIDITYREYLENMNDKRPPHIIKTIASKTQSIKKYSTDILGNLYEVKSKKHPQIIKKG | | |
| cCas9- | Staphyl- | MKRNYILGLDIGITSVGYGIIDYETRDVIDAGVRLFKEANVENNEGRRSKRGARRLKRRRRHRIQR | N580A | 1963 |
| v21 | ococcus | VKKLLFDYNLLTDHSELSGINPYEARVKGLSQKLSEEEFSAALLHLAKRRGVHNVNEVEEDTGNEL | | |
| | aureus | STKEQISRNSKALEEKYVAELQLERLKKDGEVRGSINRFKTSDYVKEAKQLLKVQKAYHQLDQSFI | | |
| | | DTYIDLLETRRTYYEGPGEGSPFGWKDIKEWYEMLMGHCTYFPEELRSVKYAYNADLYNALNDLNN | | |
| | | LVITRDENEKLEYYEKFQIIENVFKQKKKPTLKQIAKEILVNEEDIKGYRVTSTGKPEFTNLKVYH | | |
| | | DIKDITARKEIIENAELLDQIAKILTIYQSSEDIQEELTNLNSELTQEEIEQISNLKGYTGTHNLS | | |
| | | LKAINLILDELWHTNDNQIAIFNRLKLVPKKVDLSQQKEIPTTLVDDFILSPVVKRSFIQSIKVIN | | |
| | | AIIKKYGLPNDIIIELAREKNSKDAQKMINEMQKRNRQTNERIEEIIRTTGKENAKYLIEKIKLHD | | |
| | | MQEGKCLYSLEAIPLEDLLNNPFNYEVDHIIPRSVSFDNSFNNKVLVKQEENSKKGNRTPFQYLSS | | |
| | | SDSKISYETFKKHILNLAKGKGRISKTKKEYLLEERDINRFSVQKDFINRNLVDTRYATRGLMNLL | | |
| | | RSYFRVNNLDVKVKSINGGFTSFLRRKWKFKKERNKGYKHHAEDALIIANADFIFKEWKKLDKAKK | | |
| | | VMENQMFEEKQAESMPEIETEQEYKEIFITPHQIKHIKDFKDYKYSHRVDKKPNRKLINDTLYSTR | | |
| | | KDDKGNTLIVNNLNGLYDKDNDKLKKLINKSPEKLLMYHHDPQTYQKLKLIMEQYGDEKNPLYKYY | | |
| | | EETGNYLTKYSKKDNGPVIKKIKYYGNKLNAHLDITDDYPNSRNKVVKLSLKPYRFDVYLDNGVYK | | |
| | | FVTVKNLDVIKKENYYEVNSKCYEEAKKLKKISNQAEFIASFYKNDLIKINGELYRVIGVNSDDRN | | |
| | | IIELNMIDITYREYLENMNDKRPPHIIKTIASKTQSIKKYSTDILGNLYEVKSKKHPQIIKKG | | |
| cCas9- | Staphyl- | MKRNYILGLDIGITSVGYGIIDYETRDVIDAGVRLFKEANVENNEGRRSKRGARRLKRRRRHRIQR | N580A | 1964 |
| v42 | ococcus | VKKLLFDYNLLTDHSELSGINPYEARVKGLSQKLSEEEFSAALLHLAKRRGVHNVNEVEEDTGNEL | | |
| | aureus | STKEQISRNSKALEEKYVAELQLERLKKDGEVRGSINRFKTSDYVKEAKQLLKVQKAYHQLDQSFI | | |
| | | DTYIDLLETRRTYYEGPGEGSPFGWKDIKEWYEMLMGHCTYFPEELRSVKYAYNADLYNALNDLNN | | |
| | | LVITRDENEKLEYYEKFQIIENVFKQKKKPTLKQIAKEILVNEEDIKGYRVTSTGKPEFTNLKVYH | | |
| | | DIKDITARKEIIENAELLDQIAKILTIYQSSEDIQEELTNLNSELTQEEIEQISNLKGYTGTHNLS | | |
| | | LKAINLILDELWHTNDNQIAIFNRLKLVPKKVDLSQQKEIPTTLVDDFILSPVVKRSFIQSIKVIN | | |
| | | AIIKKYGLPNDIIIELAREKNSKDAQKMINEMQKRNRQTNERIEEIIRTTGKENAKYLIEKIKLHD | | |
| | | MQEGKCLYSLEAIPLEDLLNNPFNYEVDHIIPRSVSFDNSFNNKVLVKQEENSKKGNRTPFQYLSS | | |
| | | SDSKISYETFKKHILNLAKGKGRISKTKKEYLLEERDINRFSVQKDFINRNLVDTRYATRGLMNLL | | |
| | | RSYFRVNNLDVKVKSINGGFTSFLRRKWKFKKERNKGYKHHAEDALIIANADFIFKEWKKLDKAKK | | |
| | | VMENQMFEEKQAESMPEIETEQEYKEIFITPHQIKHIKDFKDYKYSHRVDKKPNRKLINDTLYSTR | | |
| | | KDDKGNTLIVNNLNGLYDKDNDKLKKLINKSPEKLLMYHHDPQTYQKLKLIMEQYGDEKNPLYKYY | | |
| | | EETGNYLTKYSKKDNGPVIKKIKYYGNKLNAHLDITDDYPNSRNKVVKLSLKPYRFDVYLDNGVYK | | |
| | | FVTVKNLDVIKKENYYEVNSKCYEEAKKLKKISNQAEFIASFYKNDLIKINGELYRVIGVNNNRLN | | |
| | | KIELNMIDITYREYLENMNDKRPPHIIKTIASKTQSIKKYSTDILGNLYEVKSKKHPQIIKKG | | |
| CdiCas9 | Coryne- | MKYHVGIDVGTFSVGLAAIEVDDAGMPIKTLSLVSHIHDSGLDPDEIKSAVTRLASSGIARRTRRL | H573A | 1965 |
| | bacterium | YRRKRRRLQQLDKFIQRQGWPVIELEDYSDPLYPWKVRAELAASYIADEKERGEKLSVALRHIARH | (Alter- | |
| | diphtheriae | RGWRNPYAKVSSLYLPDGPSDAFKAIREEIKRASGQPVPETATVGQMVTLCELGTLKLRGEGGVLS | nate) | |
| | | ARLQQSDYAREIQEICRMQEIGQELYRKIIDVVFAAESPKGSASSRVGKDPLQPGKNRALKASDAF | | |
| | | QRYRIAALIGNLRVRVDGEKRILSVEEKNLVFDHLVNLTPKKEPEWVTIAEILGIDRGQLIGTATM | | |
| | | TDDGERAGARPPTHDTNRSIVNSRIAPLVDWWKTASALEQHAMVKALSNAEVDDFDSPEGAKVQAF | | |
| | | FADLDDDVHAKLDSLHLPVGRAAYSEDTLVRLTRRMLSDGVDLYTARLQEFGIEPSWTPPTPRIGE | | |
| | | PVGNPAVDRVLKTVSRWLESATKTWGAPERVIIEHVREGFVTEKRAREMDGDMRRRAARNAKLFQE | | |
| | | MQEKLNVQGKPSRADLWRYQSVQRQNCQCAYCGSPITFSNSEMDHIVPRAGQGSTNTRENLVAVCH | | |
| | | RCNQSKGNTPFAIWAKNTSIEGVSVKEAVERTRHWVTDTGMRSTDFKKFTKAVVERFQRATMDEEI | | |
| | | DARSMESVAWMANELRSRVAQHFASHGTTVRVYRGSLTAEARRASGISGKLKFFDGVGKSRLDRRH | | |
| | | HAIDAAVIAFTSDYVAETLAVRSNLKQSQAHRQEAPQWREFTGKDAEHRAAWRVWCQKMEKLSALL | | |
| | | TEDLRDDRVVVMSNVRLRLGNGSAHKETIGKLSKVKLSSQLSVSDIDKASSEALWCALTREPGFDP | | |
| | | KEGLPANPERHIRVNGTHVYAGDNIGLFPVSAGSIALRGGYAELGSSFHHARVYKITSGKKPAFAM | | |
| | | LRVYTIDLLPYRNQDLFSVELKPQTMSMRQAEKKLRDALATGNAEYLGWLVVDDELVVDTSKIATD | | |
| | | QVKAVEAELGTIRRWRVDGFFSPSKLRLRPLQMSKEGIKKESAPELSKIIDRPGWLPAVNKLFSDG | | |
| | | NVTVVRRDSLGRVRLESTAHLPVTWKVQ | | |
| CjeCas9 | Campylobacter | MARILAFDIGISSIGWAFSENDELKDCGVRIFTKVENPKTGESLALPRRLARSARKRLARRKARLN | N582A | 1966 |
| | jejuni | HLKHLIANEFKLNYEDYQSFDESLAKAYKGSLISPYELRFRALNELLSKQDFARVILHIAKRRGYD | | |
| | | DIKNSDDKEKGAILKAIKQNEEKLANYQSVGEYLYKEYFQKFKENSKEFTNVRNKKESYERCIAQS | | |
| | | FLKDELKLIFKKQREFGFSFSKKFEEEVLSVAFYKRALKDFSHLVGNCSFFTDEKRAPKNSPLAFM | | |
| | | FVALTRIINLLNNLKNTEGILYTKDDLNALLNEVLKNGTLTYKQTKKLLGLSDDYEFKGEKGTYFI | | |
| | | EFKKYKEFIKALGEHNLSQDDLNEIAKDITLIKDEIKLKKALAKYDLNQNQIDSLSKLEFKDHLNI | | |
| | | SFKALKLVTPLMLEGKKYDEACNELNLKVAINEDKKDFLPAFNETYYKDEVTNPVVLRAIKEYRKV | | |
| | | LNALLKKYGKVHKINIELAREVGKNHSQRAKIEKEQNENYKAKKDAELECEKLGLKINSKNILKLR | | |
| | | LFKEQKEFCAYSGEKIKISDLQDEKMLEIDHIYPYSRSFDDSYMNKVLVFTKQNQEKLNQTPFEAF | | |
| | | GNDSAKWQKIEVLAKNLPTKKQKRILDKNYKDKEQKNFKDRNLNDTRYIARLVLNYTKDYLDFLPL | | |
| | | SDDENTKLNDTQKGSKVHVEAKSGMLTSALRHTWGFSAKDRNNHLHHAIDAVIIAYANNSIVKAFS | | |
| | | DFKKEQESNSAELYAKKISELDYKNKRKFFEPFSGFRQKVLDKIDEIFVSKPERKKPSGALHEETF | | |
| | | RKEEEFYQSYGGKEGVLKALELGKIRKVNGKIVKNGDMFRVDIFKHKKTNKFYAVPIYTMDFALKV | | |
| | | LPNKAVARSKKGEIKDWILMDENYEFCFSLYKDSLILIQTKDMQEPEFVYYNAFTSSTVSLIVSKH | | |
| | | DNKFETLSKNQKILFKNANEKEVIAKSIGIQNLKVFEKYIVSALGEVTKAEFRQREDFKK | | |
| GeoCas9 | Geobacillus | MRYKIGLDIGITSVGWAVMNLDIPRIEDLGVRIFDRAENPQTGESLALPRRLARSARRRLRRRKHR | N605A | 1967 |
| | stearother | LERIRRLVIREGILTKEELDKLFEEKHEIDVWQLRVEALDRKLNNDELARVLLHLAKRRGFKSNRK | | |
| | mophilus | SERSNKENSTMLKHIEENRAILSSYRTVGEMIVKDPKFALHKRNKGENYTNTIARDDLEREIRLIF | | |
| | | SKQREFGNMSCTEEFENEYITIWASQRPVASKDDIEKKVGFCTFEPKEKRAPKATYTFQSFIAWEH | | |
| | | INKLRLISPSGARGLTDEERRLLYEQAFQKNKITYHDIRTLLHLPDDTYFKGIVYDRGESRKQNEN | | |
| | | IRFLELDAYHQIRKAVDKVYGKGKSSSFLPIDFDTFGYALTLFKDDADIHSYLRNEYEQNGKRMPN | | |
| | | LANKVYDNELIEELLNLSFTKFGHLSLKALRSILPYMEQGEVYSSACERAGYTFTGPKKKQKTMLL | | |
| | | PNIPPIANPVVMRALTQARKVVNAIIKKYGSPVSIHIELARDLSQTFDERRKTKKEQDENRKKNET | | |
| | | AIRQLMEYGLTLNPTGHDIVKFKLWSEQNGRCAYSLQPIEIERLLEPGYVEVDHVIPYSRSLDDSY | | |
| | | TNKVLVLTRENREKGNRIPAEYLGVGTERWQQFETFVLTNKQFSKKKRDRLLRLHYDENEETEFKN | | |
| | | RNLNDTRYISRFFANFIREHLKFAESDDKQKVYTVNGRVTAHLRSRWEFNKNREESDLHHAVDAVI | | |
| | | VACTTPSDIAKVTAFYQRREQNKELAKKTEPHFPQPWPHFADELRARLSKHPKESIKALNLGNYDD | | |
| | | QKLESLQPVFVSRMPKRSVTGAAHQETLRRYVGIDERSGKIQTVVKTKLSEIKLDASGHFPMYGKE | | |
| | | SDPRTYEAIRQRLLEHNNDPKKAFQEPLYKPKKNGEPGPVIRTVKIIDTKNQVIPLNDGKTVAYNS | | |
| | | NIVRVDVFEKDGKYYCVPVYTMDIMKGILPNKAIEPNKPYSEWKEMTEDYTFRFSLYPNDLIRIEL | | |
| | | PREKTVKTAAGEEINVKDVFVYYKTIDSANGGLELISHDHRFSLRGVGSRTLKRFEKYQVDVLGNI | | |
| | | YKVRGEKRVGLASSAHSKPGKTIRPLQSTRD | | |
| iSpyMac | Strepto- | MDKKYSIGLDIGTNSVGWAVITDEYKVPSKKFKVLGNTDRHSIKKNLIGALLFDSGETAEATRLKR | N863A | 1968 |
| Cas9 | coccus | TARRRYTRRKNRICYLQEIFSNEMAKVDDSFFHRLEESFLVEEDKKHERHPIFGNIVDEVAYHEKY | | |
| | spp. | PTIYHLRKKLVDSTDKADLRLIYLALAHMIKFRGHFLIEGDLNPDNSDVDKLFIQLVQTYNQLFEE | | |
| | | NPINASGVDAKAILSARLSKSRKLENLIAQLPGEKKNGLFGNLIALSLGLTPNFKSNFDLAEDAKL | | |
| | | QLSKDTYDDDLDNLLAQIGDQYADLFLAAKNLSDAILLSDILRVNTEITKAPLSASMIKRYDEHHQ | | |
| | | DLTLLKALVRQQLPEKYKEIFFDQSKNGYAGYIDGGASQEEFYKFIKPILEKMDGTEELLVKLKRE | | |
| | | DLLRKQRTFDNGSIPHQIHLGELHAILRRQEDFYPFLKDNREKIEKILTFRIPYYVGPLARGNSRF | | |
| | | AWMTRKSEETITPWNFEEVVDKGASAQSFIERMTNFDKNLPNEKVLPKHSLLYEYFTVYNELTKVK | | |
| | | YVTEGMRKPAFLSGEQKKAIVDLLFKTNRKVTVKQLKEDYFKKIECFDSVEISGVEDRFNASLGTY | | |
| | | HDLLKIIKDKDFLDNEENEDILEDIVLTLTLFEDREMIEERLKTYAHLFDDKVMKQLKRRRYTGWG | | |
| | | RLSRKLINGIRDKQSGKTILDFLKSDGFANRNFMQLIHDDSLTFKEDIQKAQVSGQGDSLHEHIAN | | |
| | | LAGSPAIKKGILQTVKVVDELVKVMGRHKPENIVIEMARENQTTQKGQKNSRERMKRIEEGIKELG | | |
| | | SQILKEHPVENTQLQNEKLYLYYLQNGRDMYVDQELDINRLSDYDVDHIVPQSFLKDDSIDNKVLT | | |
| | | RSDKNRGKSDNVPSEEVVKKMKNYWRQLLNAKLITQRKFDNLTKAERGGLSELDKAGFIKRQLVET | | |
| | | RQITKHVAQILDSRMNTKYDENDKLIREVKVITLKSKLVSDFRKDFQFYKVREINNYHHAHDAYLN | | |
| | | AVVGTALIKKYPKLESEFVYGDYKVYDVRKMIAKSEQEIGKATAKYFFYSNIMNFFKTEITLANGE | | |
| | | IRKRPLIETNGETGEIVWDKGRDFATVRKVLSMPQVNIVKKTEIQTVGQNGGLFDDNPKSPLEVTP | | |
| | | SKLVPLKKELNPKKYGGYQKPTTAYPVLLITDTKQLIPISVMNKKQFEQNPVKFLRDRGYQQVGKN | | |
| | | DFIKLPKYTLVDIGDGIKRLWASSKEIHKGNQLVVSKKSQILLYHAHHLDSDLSNDYLQNHNQQFD | | |
| | | VLFNEIISFSKKCKLGKEHIQKIENVYSNKKNSASIEELAESFIKLLGFTQLGATSPFNFLGVKLN | | |
| | | QKQYKGKKDYILPCTEGTLIRQSITGLYETRVDLSKIGEDSGGSGGSKRTADGSEFES | | |
| NmeCas9 | Neisseria | MAAFKPNSINYILGLDIGIASVGWAMVEIDEEENPIRLIDLGVRVFERAEVPKTGDSLAMARRLAR | N611A | 1969 |
| | meningitidis | SVRRLTRRRAHRLLRTRRLLKREGVLQAANFDENGLIKSLPNTPWQLRAAALDRKLTPLEWSAVLL | | |
| | | HLIKHRGYLSQRKNEGETADKELGALLKGVAGNAHALQTGDFRTPAELALNKFEKESGHIRNQRSD | | |
| | | YSHTFSRKDLQAELILLFEKQKEFGNPHVSGGLKEGIETLLMTQRPALSGDAVQKMLGHCTFEPAE | | |
| | | PKAAKNTYTAERFIWLTKLNNLRILEQGSERPLTDTERATLMDEPYRKSKLTYAQARKLLGLEDTA | | |
| | | FFKGLRYGKDNAEASTLMEMKAYHAISRALEKEGLKDKKSPLNLSPELQDEIGTAFSLFKTDEDIT | | |
| | | GRLKDRIQPEILEALLKHISFDKFVQISLKALRRIVPLMEQGKRYDEACAEIYGDHYGKKNTEEKI | | |
| | | YLPPIPADEIRNPVVLRALSQARKVINGVVRRYGSPARIHIETAREVGKSFKDRKEIEKRQEENRK | | |
| | | DREKAAAKFREYFPNFVGEPKSKDILKLRLYEQQHGKCLYSGKEINLGRLNEKGYVEIDHALPFSR | | |
| | | TWDDSFNNKVLVLGSENQNKGNQTPYEYFNGKDNSREWQEFKARVETSRFPRSKKQRILLQKFDED | | |
| | | GFKERNLNDTRYVNRFLCQFVADRMRLTGKGKKRVFASNGQITNLLRGFWGLRKVRAENDRHHALD | | |
| | | AVVVACSTVAMQQKITRFVRYKEMNAFDGKTIDKETGEVLHQKTHFPQPWEFFAQEVMIRVFGKPD | | |
| | | GKPEFEEADTLEKLRTLLAEKLSSRPEAVHEYVTPLFVSRAPNRKMSGQGHMETVKSAKRLDEGVS | | |
| | | VLRVPLTQLKLKDLEKMVNREREPKLYEALKARLEAHKDDPAKAFAEPFYKYDKAGNRTQQVKAVR | | |
| | | VEQVQKTGVWVRNHNGIADNATMVRVDVFEKGDKYYLVPIYSWQVAKGILPDRAVVQGKDEEDWQL | | |
| | | IDDSFNFKFSLHPNDLVEVITKKARMFGYFASCHRGTGNINIRIHDLDHKIGKNGILEGIGVKTAL | | |
| | | SFQKYQIDELGKEIRPCRLKKRPPVR | | |
| ScaCas9 | Strepto- | MEKKYSIGLDIGTNSVGWAVITDDYKVPSKKFKVLGNTNRKSIKKNLMGALLFDSGETAEATRLKR | N872A | 1970 |
| | coccus | TARRRYTRRKNRIRYLQEIFANEMAKLDDSFFQRLEESFLVEEDKKNERHPIFGNLADEVAYHRNY | | |
| | canis | PTIYHLRKKLADSPEKADLRLIYLALAHIIKFRGHFLIEGKLNAENSDVAKLFYQLIQTYNQLFEE | | |
| | | SPLDEIEVDAKGILSARLSKSKRLEKLIAVFPNEKKNGLFGNIIALALGLTPNFKSNFDLTEDAKL | | |
| | | QLSKDTYDDDLDELLGQIGDQYADLFSAAKNLSDAILLSDILRSNSEVTKAPLSASMVKRYDEHHQ | | |
| | | DLALLKTLVRQQFPEKYAEIFKDDTKNGYAGYVGIGIKHRKRTTKLATQEEFYKFIKPILEKMDGA | | |
| | | EELLAKLNRDDLLRKQRTFDNGSIPHQIHLKELHAILRRQEEFYPFLKENREKIEKILTFRIPYYV | | |
| | | GPLARGNSRFAWLTRKSEEAITPWNFEEVVDKGASAQSFIERMTNFDEQLPNKKVLPKHSLLYEYF | | |
| | | TVYNELTKVKYVTERMRKPEFLSGEQKKAIVDLLFKTNRKVTVKQLKEDYFKKIECFDSVEIIGVE | | |
| | | DRFNASLGTYHDLLKIIKDKDFLDNEENEDILEDIVLTLTLFEDREMIEERLKTYAHLFDDKVMKQ | | |
| | | LKRRHYTGWGRLSRKMINGIRDKQSGKTILDFLKSDGFSNRNFMQLIHDDSLTFKEEIEKAQVSGQ | | |
| | | GDSLHEQIADLAGSPAIKKGILQTVKIVDELVKVMGHKPENIVIEMARENQTTTKGLQQSRERKKR | | |
| | | IEEGIKELESQILKENPVENTQLQNEKLYLYYLQNGRDMYVDQELDINRLSDYDVDHIVPQSFIKD | | |
| | | DSIDNKVLTRSVENRGKSDNVPSEEVVKKMKNYWRQLLNAKLITQRKFDNLTKAERGGLSEADKAG | | |
| | | FIKRQLVETRQITKHVARILDSRMNTKRDKNDKPIREVKVITLKSKLVSDFRKDFQLYKVRDINNY | | |
| | | HHAHDAYLNAVVGTALIKKYPKLESEFVYGDYKVYDVRKMIAKSEQEIGKATAKRFFYSNIMNFFK | | |
| | | TEVKLANGEIRKRPLIETNGETGEVVWNKEKDFATVRKVLAMPQVNIVKKTEVQTGGFSKESILSK | | |
| | | RESAKLIPRKKGWDTRKYGGFGSPTVAYSILVVAKVEKGKAKKLKSVKVLVGITIMEKGSYEKDPI | | |
| | | GFLEAKGYKDIKKELIFKLPKYSLFELENGRRRMLASATELQKANELVLPQHLVRLLYYTQNISAT | | |
| | | TGSNNLGYIEQHREEFKEIFEKIIDFSEKYILKNKVNSNLKSSFDEQFAVSDSILLSNSFVSLLKY | | |
| | | TSFGASGGFTFLDLDVKQGRLRYQTVTEVLDATLIYQSITGLYETRTDLSQLGGD | | |
| ScaCas9- | Strepto- | MEKKYSIGLDIGTNSVGWAVITDDYKVPSKKFKVLGNTNRKSIKKNLMGALLFDSGETAEATRLKR | N872A | 1971 |
| HiFi- | coccus | TARRRYTRRKNRIRYLQEIFANEMAKLDDSFFQRLEESFLVEEDKKNERHPIFGNLADEVAYHRNY | | |
| Sc++ | canis | PTIYHLRKKLADSPEKADLRLIYLALAHIIKFRGHFLIEGKLNAENSDVAKLFYQLIQTYNQLFEE | | |
| | | SPLDEIEVDAKGILSARLSKSKRLEKLIAVFPNEKKNGLFGNIIALALGLTPNFKSNFDLTEDAKL | | |
| | | QLSKDTYDDDLDELLGQIGDQYADLFSAAKNLSDAILLSDILRSNSEVTKAPLSASMVKRYDEHHQ | | |
| | | DLALLKTLVRQQFPEKYAEIFKDDTKNGYAGYVGADKKLRKRSGKLATEEEFYKFIKPILEKMDGA | | |
| | | EELLAKLNRDDLLRKQRTFDNGSIPHQIHLKELHAILRRQEEFYPFLKENREKIEKILTFRIPYYV | | |
| | | GPLARGNSRFAWLTRKSEEAITPWNFEEVVDKGASAQSFIERMTNFDEQLPNKKVLPKHSLLYEYF | | |
| | | TVYNELTKVKYVTERMRKPEFLSGEQKKAIVDLLFKTNRKVTVKQLKEDYFKKIECFDSVEIIGVE | | |
| | | DRFNASLGTYHDLLKIIKDKDFLDNEENEDILEDIVLTLTLFEDREMIEERLKTYAHLFDDKVMKQ | | |
| | | LKRRHYTGWGRLSRKMINGIRDKQSGKTILDFLKSDGFSNANFMQLIHDDSLTFKEEIEKAQVSGQ | | |
| | | GDSLHEQIADLAGSPAIKKGILQTVKIVDELVKVMGHKPENIVIEMARENQTTTKGLQQSRERKKR | | |
| | | IEEGIKELESQILKENPVENTQLQNEKLYLYYLQNGRDMYVDQELDINRLSDYDVDHIVPQSFIKD | | |
| | | DSIDNKVLTRSVENRGKSDNVPSEEVVKKMKNYWRQLLNAKLITQRKFDNLTKAERGGLSEADKAG | | |
| | | FIKRQLVETRQITKHVARILDSRMNTKRDKNDKPIREVKVITLKSKLVSDFRKDFQLYKVRDINNY | | |
| | | HHAHDAYLNAVVGTALIKKYPKLESEFVYGDYKVYDVRKMIAKSEQEIGKATAKRFFYSNIMNFFK | | |
| | | TEVKLANGEIRKRPLIETNGETGEVVWNKEKDFATVRKVLAMPQVNIVKKTEVQTGGFSKESILSK | | |
| | | RESAKLIPRKKGWDTRKYGGFGSPTVAYSILVVAKVEKGKAKKLKSVKVLVGITIMEKGSYEKDPI | | |
| | | GFLEAKGYKDIKKELIFKLPKYSLFELENGRRRMLASAKELQKANELVLPQHLVRLLYYTQNISAT | | |
| | | TGSNNLGYIEQHREEFKEIFEKIIDFSEKYILKNKVNSNLKSSFDEQFAVSDSILLSNSFVSLLKY | | |
| | | TSFGASGGFTFLDLDVKQGRLRYQTVTEVLDATLIYQSITGLYETRTDLSQLGGD | | |
| SpyCas9- | Strepto- | MDKKYSIGLDIGTNSVGWAVITDEYKVPSKKFKVLGNTDRHSIKKNLIGALLFDSGETAEATRLKR | N863A | 1972 |
| 3var- | coccus | TARRRYTRRKNRICYLQEIFSNEMAKVDDSFFHRLEESFLVEEDKKHERHPIFGNIVDEVAYHEKY | | |
| NRRH | pyogenes | PTIYHLRKKLVDSTDKADLRLIYLALAHMIKFRGHFLIEGDLNPDNSDVDKLFIQLVQTYNQLFEE | | |
| | | NPINASGVDAKAILSARLSKSRRLENLIAQLPGEKKNGLFGNLIALSLGLTPNFKSNFDLAEDAKL | | |
| | | QLSKDTYDDDLDNLLAQIGDQYADLFLAAKNLSDAILLSDILRVNTEITKAPLSASMVKRYDEHHQ | | |
| | | DLTLLKALVRQQLPEKYKEIFFDQSKNGYAGYIDGGASQEEFYKFIKPILEKMDGTEELLVKLNRE | | |
| | | DLLRKQRTFDNGIIPHQIHLGELHAILRRQGDFYPFLKDNREKIEKILTFRIPYYVGPLARGNSRF | | |
| | | AWMTRKSEETITPWNFEEVVDKGASAQSFIERMTNFDKNLPNEKVLPKHSLLYEYFTVYNELTKVK | | |
| | | YVTEGMRKPAFLSGEQKKAIVDLLFKTNRKVTVKQLKEDYFKKIECFDSVEISGVEDRFNASLGTY | | |
| | | HDLLKIIKDKDFLDNEENEDILEDIVLTLTLFEDREMIEERLKTYAHLFDDKVMKQLKRLRYTGWG | | |
| | | RLSRKLINGIRDKQSGKTILDFLKSDGFANRNFMQLIHDDSLTFKEDIQKAQVSGQGDSLHEHIAN | | |
| | | LAGSPAIKKGILQTVKVVDELVKVMGGHKPENIVIEMARENQTTQKGQKNSRERMKRIEEGIKELG | | |
| | | SQILKEHPVENTQLQNEKLYLYYLQNGRDMYVDQELDINRLSDYDVDHIVPQSFLKDDSIDNKVLT | | |
| | | RSDKNRGKSDNVPSEEVVKKMKNYWRQLLNAKLITQRKFDNLTKAERGGLSELDKAGFIKRQLVET | | |
| | | RQITKHVAQILDSRMNTKYDENDKLIREVKVITLKSKLVSDFRKDFQFYKVREINNYHHAHDAYLN | | |
| | | AVVGTALIKKYPKLESEFVYGDYKVYDVRKMIAKSEQEIGKATAKYFFYSNIMNFFKTEITLANGE | | |
| | | IRKRPLIETNGETGEIVWDKGRDFATVRKVLSMPQVNIVKKTEVQTGGFSKESILPKGNSDKLIAR | | |
| | | KKDWDPKKYGGFNSPTAAYSVLVVAKVEKGKSKKLKSVKELLGITIMERSSFEKNPIGFLEAKGYK | | |
| | | EVKKDLIIKLPKYSLFELENGRKRMLASAGVLHKGNELALPSKYVNFLYLASHYEKLKGSPEDNEQ | | |
| | | KQLFVEQHKHYLDEIIEQISEFSKRVILADANLDKVLSAYNKHRDKPIREQAENIIHLFTLTNLGV | | |
| | | PAAFKYFDTTIDKKRYTSTKEVLDATLIHQSITGLYETRIDLSQLGGD | | |
| SpyCas9- | Strepto- | MDKKYSIGLDIGTNSVGWAVITDEYKVPSKKFKVLGNTDRHSIKKNLIGALLFDSGETAEATRLKR | N863A | 1973 |
| 3var- | coccus | TARRRYTRRKNRICYLQEIFSNEMAKVDDSFFHRLEESFLVEEDKKHERHPIFGNIVDEVAYHEKY | | |
| NRTH | pyogenes | PTIYHLRKKLVDSTDKADLRLIYLALAHMIKFRGHFLIEGDLNPDNSDVDKLFIQLVQTYNQLFEE | | |
| | | NPINASGVDAKAILSARLSKSRRLENLIAQLPGEKKNGLFGNLIALSLGLTPNFKSNFDLAEDAKL | | |
| | | QLSKDTYDDDLDNLLAQIGDQYADLFLAAKNLSDAILLSDILRVNTEITKAPLSASMVKRYDEHHQ | | |
| | | DLTLLKALVRQQLPEKYKEIFFDQSKNGYAGYIDGGASQEEFYKFIKPILEKMDGTEELLVKLNRE | | |
| | | DLLRKQRTFDNGIIPHQIHLGELHAILRRQGDFYPFLKDNREKIEKILTFRIPYYVGPLARGNSRF | | |
| | | AWMTRKSEETITPWNFEEVVDKGASAQSFIERMTNFDKNLPNEKVLPKHSLLYEYFTVYNELTKVK | | |
| | | YVTEGMRKPAFLSGEQKKAIVDLLFKTNRKVTVKQLKEDYFKKIECFDSVEISGVEDRFNASLGTY | | |
| | | HDLLKIIKDKDFLDNEENEDILEDIVLTLTLFEDREMIEERLKTYAHLFDDKVMKQLKRLRYTGWG | | |
| | | RLSRKLINGIRDKQSGKTILDFLKSDGFANRNFMQLIHDDSLTFKEDIQKAQVSGQGDSLHEHIAN | | |
| | | LAGSPAIKKGILQTVKVVDELVKVMGGHKPENIVIEMARENQTTQKGQKNSRERMKRIEEGIKELG | | |
| | | SQILKEHPVENTQLQNEKLYLYYLQNGRDMYVDQELDINRLSDYDVDHIVPQSFLKDDSIDNKVLT | | |
| | | RSDKNRGKSDNVPSEEVVKKMKNYWRQLLNAKLITQRKFDNLTKAERGGLSELDKAGFIKRQLVET | | |
| | | RQITKHVAQILDSRMNTKYDENDKLIREVKVITLKSKLVSDFRKDFQFYKVREINNYHHAHDAYLN | | |
| | | AVVGTALIKKYPKLESEFVYGDYKVYDVRKMIAKSEQEIGKATAKYFFYSNIMNFFKTEITLANGE | | |
| | | IRKRPLIETNGETGEIVWDKGRDFATVRKVLSMPQVNIVKKTEVQTGGFSKESILPKGNSDKLIAR | | |
| | | KKDWDPKKYGGFNSPTVAYSVLVVAKVEKGKSKKLKSVKELLGITIMERSSFEKNPIGFLEAKGYK | | |
| | | EVKKDLIIKLPKYSLFELENGRKRMLASASVLHKGNELALPSKYVNFLYLASHYEKLKGSSEDNKQ | | |
| | | KQLFVEQHKHYLDEIIEQISEFSKRVILADANLDKVLSAYNKHRDKPIREQAENIIHLFTLTNLGA | | |
| | | SAAFKYFDTTIGRKLYTSTKEVLDATLIHQSITGLYETRIDLSQLGGD | | |
| SpyCas9- | Strepto- | MDKKYSIGLDIGTNSVGWAVITDEYKVPSKKFKVLGNTDRHSIKKNLIGALLFDSGETAEATRLKR | N863A | 1974 |
| 3var- | coccus | TARRRYTRRKNRICYLQEIFSNEMAKVDDSFFHRLEESFLVEEDKKHERHPIFGNIVDEVAYHEKY | | |
| NRCH | pyogenes | PTIYHLRKKLVDSTDKADLRLIYLALAHMIKFRGHFLIEGDLNPDNSDVDKLFIQLVQTYNQLFEE | | |
| | | NPINASGVDAKAILSARLSKSRRLENLIAQLPGEKKNGLFGNLIALSLGLTPNFKSNFDLAEDAKL | | |
| | | QLSKDTYDDDLDNLLAQIGDQYADLFLAAKNLSDAILLSDILRVNTEITKAPLSASMVKRYDEHHQ | | |
| | | DLTLLKALVRQQLPEKYKEIFFDQSKNGYAGYIDGGASQEEFYKFIKPILEKMDGTEELLVKLNRE | | |
| | | DLLRKQRTFDNGIIPHQIHLGELHAILRRQGDFYPFLKDNREKIEKILTFRIPYYVGPLARGNSRF | | |
| | | AWMTRKSEETITPWNFEEVVDKGASAQSFIERMTNFDKNLPNEKVLPKHSLLYEYFTVYNELTKVK | | |
| | | YVTEGMRKPAFLSGEQKKAIVDLLFKTNRKVTVKQLKEDYFKKIECFDSVEISGVEDRFNASLGTY | | |
| | | HDLLKIIKDKDFLDNEENEDILEDIVLTLTLFEDREMIEERLKTYAHLFDDKVMKQLKRLRYTGWG | | |
| | | RLSRKLINGIRDKQSGKTILDFLKSDGFANRNFMQLIHDDSLTFKEDIQKAQVSGQGDSLHEHIAN | | |
| | | LAGSPAIKKGILQTVKVVDELVKVMGGHKPENIVIEMARENQTTQKGQKNSRERMKRIEEGIKELG | | |
| | | SQILKEHPVENTQLQNEKLYLYYLQNGRDMYVDQELDINRLSDYDVDHIVPQSFLKDDSIDNKVLT | | |
| | | RSDKNRGKSDNVPSEEVVKKMKNYWRQLLNAKLITQRKFDNLTKAERGGLSELDKAGFIKRQLVET | | |
| | | RQITKHVAQILDSRMNTKYDENDKLIREVKVITLKSKLVSDFRKDFQFYKVREINNYHHAHDAYLN | | |
| | | AVVGTALIKKYPKLESEFVYGDYKVYDVRKMIAKSEQEIGKATAKYFFYSNIMNFFKTEITLANGE | | |
| | | IRKRPLIETNGETGEIVWDKGRDFATVRKVLSMPQVNIVKKTEVQTGGFSKESILPKGNSDKLIAR | | |
| | | KKDWDPKKYGGFNSPTVAYSVLVVAKVEKGKSKKLKSVKELLGITIMERSSFEKNPIDFLEAKGYK | | |
| | | EVKKDLIIKLPKYSLFELENGRKRMLASAGVLQKGNELALPSKYVNFLYLASHYEKLKGSPEDNEQ | | |
| | | KQLFVEQHKHYLDEIIEQISEFSKRVILADANLDKVLSAYNKHRDKPIREQAENIIHLFTLTNLGA | | |
| | | PAAFKYFDTTINRKQYNTTKEVLDATLIRQSITGLYETRIDLSQLGGD | | |
| SpyCas9- | Strepto- | MDKKYSIGLDIGTNSVGWAVITDEYKVPSKKFKVLGNTDRHSIKKNLIGALLFDSGETAEATRLKR | N863A | 1975 |
| HF1 | coccus | TARRRYTRRKNRICYLQEIFSNEMAKVDDSFFHRLEESFLVEEDKKHERHPIFGNIVDEVAYHEKY | | |
| | pyogenes | PTIYHLRKKLVDSTDKADLRLIYLALAHMIKFRGHFLIEGDLNPDNSDVDKLFIQLVQTYNQLFEE | | |
| | | NPINASGVDAKAILSARLSKSRRLENLIAQLPGEKKNGLFGNLIALSLGLTPNFKSNFDLAEDAKL | | |
| | | QLSKDTYDDDLDNLLAQIGDQYADLFLAAKNLSDAILLSDILRVNTEITKAPLSASMIKRYDEHHQ | | |
| | | DLTLLKALVRQQLPEKYKEIFFDQSKNGYAGYIDGGASQEEFYKFIKPILEKMDGTEELLVKLNRE | | |
| | | DLLRKQRTFDNGSIPHQIHLGELHAILRRQEDFYPFLKDNREKIEKILTFRIPYYVGPLARGNSRF | | |
| | | AWMTRKSEETITPWNFEEVVDKGASAQSFIERMTNFDKNLPNEKVLPKHSLLYEYFTVYNELTKVK | | |
| | | YVTEGMRKPAFLSGEQKKAIVDLLFKTNRKVTVKQLKEDYFKKIECFDSVEISGVEDRFNASLGTY | | |
| | | HDLLKIIKDKDFLDNEENEDILEDIVLTLTLFEDREMIEERLKTYAHLFDDKVMKQLKRRRYTGWG | | |
| | | RLSRKLINGIRDKQSGKTILDFLKSDGFANRNFMQLIHDDSLTFKEDIQKAQVSGQGDSLHEHIAN | | |
| | | LAGSPAIKKGILQTVKVVDELVKVMGRHKPENIVIEMARENQTTQKGQKNSRERMKRIEEGIKELG | | |
| | | SQILKEHPVENTQLQNEKLYLYYLQNGRDMYVDQELDINRLSDYDVDHIVPQSFLKDDSIDNKVLT | | |
| | | RSDKNRGKSDNVPSEEVVKKMKNYWRQLLNAKLITQRKFDNLTKAERGGLSELDKAGFIKRQLVET | | |
| | | RQITKHVAQILDSRMNTKYDENDKLIREVKVITLKSKLVSDFRKDFQFYKVREINNYHHAHDAYLN | | |
| | | AVVGTALIKKYPKLESEFVYGDYKVYDVRKMIAKSEQEIGKATAKYFFYSNIMNFFKTEITLANGE | | |
| | | IRKRPLIETNGETGEIVWDKGRDFATVRKVLSMPQVNIVKKTEVQTGGFSKESILPKRNSDKLIAR | | |
| | | KKDWDPKKYGGFDSPTVAYSVLVVAKVEKGKSKKLKSVKELLGITIMERSSFEKNPIDFLEAKGYK | | |
| | | EVKKDLIIKLPKYSLFELENGRKRMLASAGELQKGNELALPSKYVNFLYLASHYEKLKGSPEDNEQ | | |
| | | KQLFVEQHKHYLDEIIEQISEFSKRVILADANLDKVLSAYNKHRDKPIREQAENIIHLFTLTNLGA | | |
| | | PAAFKYFDTTIDRKRYTSTKEVLDATLIHQSITGLYETRIDLSQLGGD | | |
| SpyCas9- | Strepto- | MDKKYSIGLDIGTNSVGWAVITDEYKVPSKKFKVLGNTDRHSIKKNLIGALLFDSGETAEATRLKR | N863A | 1976 |
| QQR1 | coccus | TARRRYTRRKNRICYLQEIFSNEMAKVDDSFFHRLEESFLVEEDKKHERHPIFGNIVDEVAYHEKY | | |
| | pyogenes | PTIYHLRKKLVDSTDKADLRLIYLALAHMIKFRGHFLIEGDLNPDNSDVDKLFIQLVQTYNQLFEE | | |
| | | NPINASGVDAKAILSARLSKSRRLENLIAQLPGEKKNGLFGNLIALSLGLTPNFKSNFDLAEDAKL | | |
| | | QLSKDTYDDDLDNLLAQIGDQYADLFLAAKNLSDAILLSDILRVNTEITKAPLSASMIKRYDEHHQ | | |
| | | DLTLLKALVRQQLPEKYKEIFFDQSKNGYAGYIDGGASQEEFYKFIKPILEKMDGTEELLVKLNRE | | |
| | | DLLRKQRTFDNGSIPHQIHLGELHAILRRQEDFYPFLKDNREKIEKILTFRIPYYVGPLARGNSRF | | |
| | | AWMTRKSEETITPWNFEEVVDKGASAQSFIERMTNFDKNLPNEKVLPKHSLLYEYFTVYNELTKVK | | |
| | | YVTEGMRKPAFLSGEQKKAIVDLLFKTNRKVTVKQLKEDYFKKIECFDSVEISGVEDRFNASLGTY | | |
| | | HDLLKIIKDKDFLDNEENEDILEDIVLTLTLFEDREMIEERLKTYAHLFDDKVMKQLKRRRYTGWG | | |
| | | RLSRKLINGIRDKQSGKTILDFLKSDGFANRNFMQLIHDDSLTFKEDIQKAQVSGQGDSLHEHIAN | | |
| | | LAGSPAIKKGILQTVKVVDELVKVMGRHKPENIVIEMARENQTTQKGQKNSRERMKRIEEGIKELG | | |
| | | SQILKEHPVENTQLQNEKLYLYYLQNGRDMYVDQELDINRLSDYDVDHIVPQSFLKDDSIDNKVLT | | |
| | | RSDKNRGKSDNVPSEEVVKKMKNYWRQLLNAKLITQRKFDNLTKAERGGLSELDKAGFIKRQLVET | | |
| | | RQITKHVAQILDSRMNTKYDENDKLIREVKVITLKSKLVSDFRKDFQFYKVREINNYHHAHDAYLN | | |
| | | AVVGTALIKKYPKLESEFVYGDYKVYDVRKMIAKSEQEIGKATAKYFFYSNIMNFFKTEITLANGE | | |
| | | IRKRPLIETNGETGEIVWDKGRDFATVRKVLSMPQVNIVKKTEVQTGGFSKESILPKRNSDKLIAR | | |
| | | KKDWDPKKYGGFDSPTVAYSVLVVAKVEKGKSKKLKSVKELLGITIMERSSFEKNPIDFLEAKGYK | | |
| | | EVKKDLIIKLPKYSLFELENGRKRMLASARELQKGNELALPSKYVNFLYLASHYEKLKGSPEDNEQ | | |
| | | KQLFVEQHKHYLDEIIEQISEFSKRVILADAQLDKVLSAYNKHRDKPIREQAENIIHLFTLTNLGA | | |
| | | PAAFKYFDTTFKQKQYRSTKEVLDATLIHQSITGLYETRIDLSQLGGD | | |
| SpyCas9- | Strepto- | MDKKYSIGLDIGTNSVGWAVITDEYKVPSKKFKVLGNTDRHSIKKNLIGALLFDSGETAEATRLKR | N863A | 1977 |
| SpG | coccus | TARRRYTRRKNRICYLQEIFSNEMAKVDDSFFHRLEESFLVEEDKKHERHPIFGNIVDEVAYHEKY | | |
| | pyogenes | PTIYHLRKKLVDSTDKADLRLIYLALAHMIKFRGHFLIEGDLNPDNSDVDKLFIQLVQTYNQLFEE | | |
| | | NPINASGVDAKAILSARLSKSRRLENLIAQLPGEKKNGLFGNLIALSLGLTPNFKSNFDLAEDAKL | | |
| | | QLSKDTYDDDLDNLLAQIGDQYADLFLAAKNLSDAILLSDILRVNTEITKAPLSASMIKRYDEHHQ | | |
| | | DLTLLKALVRQQLPEKYKEIFFDQSKNGYAGYIDGGASQEEFYKFIKPILEKMDGTEELLVKLNRE | | |
| | | DLLRKQRTFDNGSIPHQIHLGELHAILRRQEDFYPFLKDNREKIEKILTFRIPYYVGPLARGNSRF | | |
| | | AWMTRKSEETITPWNFEEVVDKGASAQSFIERMTNFDKNLPNEKVLPKHSLLYEYFTVYNELTKVK | | |
| | | YVTEGMRKPAFLSGEQKKAIVDLLFKTNRKVTVKQLKEDYFKKIECFDSVEISGVEDRFNASLGTY | | |
| | | HDLLKIIKDKDFLDNEENEDILEDIVLTLTLFEDREMIEERLKTYAHLFDDKVMKQLKRRRYTGWG | | |
| | | RLSRKLINGIRDKQSGKTILDFLKSDGFANRNFMQLIHDDSLTFKEDIQKAQVSGQGDSLHEHIAN | | |
| | | LAGSPAIKKGILQTVKVVDELVKVMGRHKPENIVIEMARENQTTQKGQKNSRERMKRIEEGIKELG | | |
| | | SQILKEHPVENTQLQNEKLYLYYLQNGRDMYVDQELDINRLSDYDVDHIVPQSFLKDDSIDNKVLT | | |
| | | RSDKNRGKSDNVPSEEVVKKMKNYWRQLLNAKLITQRKFDNLTKAERGGLSELDKAGFIKRQLVET | | |
| | | RQITKHVAQILDSRMNTKYDENDKLIREVKVITLKSKLVSDFRKDFQFYKVREINNYHHAHDAYLN | | |
| | | AVVGTALIKKYPKLESEFVYGDYKVYDVRKMIAKSEQEIGKATAKYFFYSNIMNFFKTEITLANGE | | |
| | | IRKRPLIETNGETGEIVWDKGRDFATVRKVLSMPQVNIVKKTEVQTGGFSKESILPKRNSDKLIAR | | |
| | | KKDWDPKKYGGFLWPTVAYSVLVVAKVEKGKSKKLKSVKELLGITIMERSSFEKNPIDFLEAKGYK | | |
| | | EVKKDLIIKLPKYSLFELENGRKRMLASAKQLQKGNELALPSKYVNFLYLASHYEKLKGSPEDNEQ | | |
| | | KQLFVEQHKHYLDEIIEQISEFSKRVILADANLDKVLSAYNKHRDKPIREQAENIIHLFTLTNLGA | | |
| | | PAAFKYFDTTIDRKQYRSTKEVLDATLIHQSITGLYETRIDLSQLGGD | | |
| SpyCas9- | Strepto- | MDKKYSIGLDIGTNSVGWAVITDEYKVPSKKFKVLGNTDRHSIKKNLIGALLFDSGETAEATRLKR | N863A | 1978 |
| VQR | coccus | TARRRYTRRKNRICYLQEIFSNEMAKVDDSFFHRLEESFLVEEDKKHERHPIFGNIVDEVAYHEKY | | |
| | pyogenes | PTIYHLRKKLVDSTDKADLRLIYLALAHMIKFRGHFLIEGDLNPDNSDVDKLFIQLVQTYNQLFEE | | |
| | | NPINASGVDAKAILSARLSKSRRLENLIAQLPGEKKNGLFGNLIALSLGLTPNFKSNFDLAEDAKL | | |
| | | QLSKDTYDDDLDNLLAQIGDQYADLFLAAKNLSDAILLSDILRVNTEITKAPLSASMIKRYDEHHQ | | |
| | | DLTLLKALVRQQLPEKYKEIFFDQSKNGYAGYIDGGASQEEFYKFIKPILEKMDGTEELLVKLNRE | | |
| | | DLLRKQRTFDNGSIPHQIHLGELHAILRRQEDFYPFLKDNREKIEKILTFRIPYYVGPLARGNSRF | | |
| | | AWMTRKSEETITPWNFEEVVDKGASAQSFIERMTNFDKNLPNEKVLPKHSLLYEYFTVYNELTKVK | | |
| | | YVTEGMRKPAFLSGEQKKAIVDLLFKTNRKVTVKQLKEDYFKKIECFDSVEISGVEDRFNASLGTY | | |
| | | HDLLKIIKDKDFLDNEENEDILEDIVLTLTLFEDREMIEERLKTYAHLFDDKVMKQLKRRRYTGWG | | |
| | | RLSRKLINGIRDKQSGKTILDFLKSDGFANRNFMQLIHDDSLTFKEDIQKAQVSGQGDSLHEHIAN | | |
| | | LAGSPAIKKGILQTVKVVDELVKVMGRHKPENIVIEMARENQTTQKGQKNSRERMKRIEEGIKELG | | |
| | | SQILKEHPVENTQLQNEKLYLYYLQNGRDMYVDQELDINRLSDYDVDHIVPQSFLKDDSIDNKVLT | | |
| | | RSDKNRGKSDNVPSEEVVKKMKNYWRQLLNAKLITQRKFDNLTKAERGGLSELDKAGFIKRQLVET | | |
| | | RQITKHVAQILDSRMNTKYDENDKLIREVKVITLKSKLVSDFRKDFQFYKVREINNYHHAHDAYLN | | |
| | | AVVGTALIKKYPKLESEFVYGDYKVYDVRKMIAKSEQEIGKATAKYFFYSNIMNFFKTEITLANGE | | |
| | | IRKRPLIETNGETGEIVWDKGRDFATVRKVLSMPQVNIVKKTEVQTGGFSKESILPKRNSDKLIAR | | |
| | | KKDWDPKKYGGFVSPTVAYSVLVVAKVEKGKSKKLKSVKELLGITIMERSSFEKNPIDFLEAKGYK | | |
| | | EVKKDLIIKLPKYSLFELENGRKRMLASAGELQKGNELALPSKYVNFLYLASHYEKLKGSPEDNEQ | | |
| | | KQLFVEQHKHYLDEIIEQISEFSKRVILADANLDKVLSAYNKHRDKPIREQAENIIHLFTLTNLGA | | |
| | | PAAFKYFDTTIDRKQYRSTKEVLDATLIHQSITGLYETRIDLSQLGGD | | |
| SpyCas9- | Strepto- | MDKKYSIGLDIGTNSVGWAVITDEYKVPSKKFKVLGNTDRHSIKKNLIGALLFDSGETAEATRLKR | N863A | 1979 |
| VRER | coccus | TARRRYTRRKNRICYLQEIFSNEMAKVDDSFFHRLEESFLVEEDKKHERHPIFGNIVDEVAYHEKY | | |
| | pyogenes | PTIYHLRKKLVDSTDKADLRLIYLALAHMIKFRGHFLIEGDLNPDNSDVDKLFIQLVQTYNQLFEE | | |
| | | NPINASGVDAKAILSARLSKSRRLENLIAQLPGEKKNGLFGNLIALSLGLTPNFKSNFDLAEDAKL | | |
| | | QLSKDTYDDDLDNLLAQIGDQYADLFLAAKNLSDAILLSDILRVNTEITKAPLSASMIKRYDEHHQ | | |
| | | DLTLLKALVRQQLPEKYKEIFFDQSKNGYAGYIDGGASQEEFYKFIKPILEKMDGTEELLVKLNRE | | |
| | | DLLRKQRTFDNGSIPHQIHLGELHAILRRQEDFYPFLKDNREKIEKILTFRIPYYVGPLARGNSRF | | |
| | | AWMTRKSEETITPWNFEEVVDKGASAQSFIERMTNFDKNLPNEKVLPKHSLLYEYFTVYNELTKVK | | |
| | | YVTEGMRKPAFLSGEQKKAIVDLLFKTNRKVTVKQLKEDYFKKIECFDSVEISGVEDRFNASLGTY | | |
| | | HDLLKIIKDKDFLDNEENEDILEDIVLTLTLFEDREMIEERLKTYAHLFDDKVMKQLKRRRYTGWG | | |
| | | RLSRKLINGIRDKQSGKTILDFLKSDGFANRNFMQLIHDDSLTFKEDIQKAQVSGQGDSLHEHIAN | | |
| | | LAGSPAIKKGILQTVKVVDELVKVMGRHKPENIVIEMARENQTTQKGQKNSRERMKRIEEGIKELG | | |
| | | SQILKEHPVENTQLQNEKLYLYYLQNGRDMYVDQELDINRLSDYDVDHIVPQSFLKDDSIDNKVLT | | |
| | | RSDKNRGKSDNVPSEEVVKKMKNYWRQLLNAKLITQRKFDNLTKAERGGLSELDKAGFIKRQLVET | | |
| | | RQITKHVAQILDSRMNTKYDENDKLIREVKVITLKSKLVSDFRKDFQFYKVREINNYHHAHDAYLN | | |
| | | AVVGTALIKKYPKLESEFVYGDYKVYDVRKMIAKSEQEIGKATAKYFFYSNIMNFFKTEITLANGE | | |
| | | IRKRPLIETNGETGEIVWDKGRDFATVRKVLSMPQVNIVKKTEVQTGGFSKESILPKRNSDKLIAR | | |
| | | KKDWDPKKYGGFVSPTVAYSVLVVAKVEKGKSKKLKSVKELLGITIMERSSFEKNPIDFLEAKGYK | | |
| | | EVKKDLIIKLPKYSLFELENGRKRMLASARELQKGNELALPSKYVNFLYLASHYEKLKGSPEDNEQ | | |
| | | KQLFVEQHKHYLDEIIEQISEFSKRVILADANLDKVLSAYNKHRDKPIREQAENIIHLFTLTNLGA | | |
| | | PAAFKYFDTTIDRKEYRSTKEVLDATLIHQSITGLYETRIDLSQLGGD | | |
| SpyCas9- | Strepto- | MDKKYSIGLDIGTNSVGWAVITDEYKVPSKKFKVLGNTDRHSIKKNLIGALLFDSGETAEATRLKR | N863A | 1980 |
| xCas | coccus | TARRRYTRRKNRICYLQEIFSNEMAKVDDSFFHRLEESFLVEEDKKHERHPIFGNIVDEVAYHEKY | | |
| | pyogenes | PTIYHLRKKLVDSTDKADLRLIYLALAHMIKFRGHFLIEGDLNPDNSDVDKLFIQLVQTYNQLFEE | | |
| | | NPINASGVDAKAILSARLSKSRRLENLIAQLPGEKKNGLFGNLIALSLGLTPNFKSNFDLAEDTKL | | |
| | | QLSKDTYDDDLDNLLAQIGDQYADLFLAAKNLSDAILLSDILRVNTEITKAPLSASMIKLYDEHHQ | | |
| | | DLTLLKALVRQQLPEKYKEIFFDQSKNGYAGYIDGGASQEEFYKFIKPILEKMDGTEELLVKLNRE | | |
| | | DLLRKQRTFDNGIIPHQIHLGELHAILRRQEDFYPFLKDNREKIEKILTFRIPYYVGPLARGNSRF | | |
| | | AWMTRKSEETITPWNFEKVVDKGASAQSFIERMTNFDKNLPNEKVLPKHSLLYEYFTVYNELTKVK | | |
| | | YVTEGMRKPAFLSGDQKKAIVDLLFKTNRKVTVKQLKEDYFKKIECFDSVEISGVEDRFNASLGTY | | |
| | | HDLLKIIKDKDFLDNEENEDILEDIVLTLTLFEDREMIEERLKTYAHLFDDKVMKQLKRRRYTGWG | | |
| | | RLSRKLINGIRDKQSGKTILDFLKSDGFANRNFIQLIHDDSLTFKEDIQKAQVSGQGDSLHEHIAN | | |
| | | LAGSPAIKKGILQTVKVVDELVKVMGRHKPENIVIEMARENQTTQKGQKNSRERMKRIEEGIKELG | | |
| | | SQILKEHPVENTQLQNEKLYLYYLQNGRDMYVDQELDINRLSDYDVDHIVPQSFLKDDSIDNKVLT | | |
| | | RSDKNRGKSDNVPSEEVVKKMKNYWRQLLNAKLITQRKFDNLTKAERGGLSELDKAGFIKRQLVET | | |
| | | RQITKHVAQILDSRMNTKYDENDKLIREVKVITLKSKLVSDFRKDFQFYKVREINNYHHAHDAYLN | | |
| | | AVVGTALIKKYPKLESEFVYGDYKVYDVRKMIAKSEQEIGKATAKYFFYSNIMNFFKTEITLANGE | | |
| | | IRKRPLIETNGETGEIVWDKGRDFATVRKVLSMPQVNIVKKTEVQTGGFSKESILPKRNSDKLIAR | | |
| | | KKDWDPKKYGGFDSPTVAYSVLVVAKVEKGKSKKLKSVKELLGITIMERSSFEKNPIDFLEAKGYK | | |
| | | EVKKDLIIKLPKYSLFELENGRKRMLASAGVLQKGNELALPSKYVNFLYLASHYEKLKGSPEDNEQ | | |
| | | KQLFVEQHKHYLDEIIEQISEFSKRVILADANLDKVLSAYNKHRDKPIREQAENIIHLFTLTNLGA | | |
| | | PAAFKYFDTTIDRKRYTSTKEVLDATLIHQSITGLYETRIDLSQLGGD | | |
| SpyCas9- | Strepto- | MDKKYSIGLDIGTNSVGWAVITDEYKVPSKKFKVLGNTDRHSIKKNLIGALLFDSGETAEATRLKR | N863A | 1981 |
| xCas-NG | coccus | TARRRYTRRKNRICYLQEIFSNEMAKVDDSFFHRLEESFLVEEDKKHERHPIFGNIVDEVAYHEKY | | |
| | pyogenes | PTIYHLRKKLVDSTDKADLRLIYLALAHMIKFRGHFLIEGDLNPDNSDVDKLFIQLVQTYNQLFEE | | |
| | | NPINASGVDAKAILSARLSKSRRLENLIAQLPGEKKNGLFGNLIALSLGLTPNFKSNFDLAEDTKL | | |
| | | QLSKDTYDDDLDNLLAQIGDQYADLFLAAKNLSDAILLSDILRVNTEITKAPLSASMIKLYDEHHQ | | |
| | | DLTLLKALVRQQLPEKYKEIFFDQSKNGYAGYIDGGASQEEFYKFIKPILEKMDGTEELLVKLNRE | | |
| | | DLLRKQRTFDNGIIPHQIHLGELHAILRRQEDFYPFLKDNREKIEKILTFRIPYYVGPLARGNSRF | | |
| | | AWMTRKSEETITPWNFEKVVDKGASAQSFIERMTNFDKNLPNEKVLPKHSLLYEYFTVYNELTKVK | | |
| | | YVTEGMRKPAFLSGDQKKAIVDLLFKTNRKVTVKQLKEDYFKKIECFDSVEISGVEDRFNASLGTY | | |
| | | HDLLKIIKDKDFLDNEENEDILEDIVLTLTLFEDREMIEERLKTYAHLFDDKVMKQLKRRRYTGWG | | |
| | | RLSRKLINGIRDKQSGKTILDFLKSDGFANRNFIQLIHDDSLTFKEDIQKAQVSGQGDSLHEHIAN | | |
| | | LAGSPAIKKGILQTVKVVDELVKVMGRHKPENIVIEMARENQTTQKGQKNSRERMKRIEEGIKELG | | |
| | | SQILKEHPVENTQLQNEKLYLYYLQNGRDMYVDQELDINRLSDYDVDHIVPQSFLKDDSIDNKVLT | | |
| | | RSDKNRGKSDNVPSEEVVKKMKNYWRQLLNAKLITQRKFDNLTKAERGGLSELDKAGFIKRQLVET | | |
| | | RQITKHVAQILDSRMNTKYDENDKLIREVKVITLKSKLVSDFRKDFQFYKVREINNYHHAHDAYLN | | |
| | | AVVGTALIKKYPKLESEFVYGDYKVYDVRKMIAKSEQEIGKATAKYFFYSNIMNFFKTEITLANGE | | |
| | | IRKRPLIETNGETGEIVWDKGRDFATVRKVLSMPQVNIVKKTEVQTGGFSKESIRPKRNSDKLIAR | | |
| | | KKDWDPKKYGGFVSPTVAYSVLVVAKVEKGKSKKLKSVKELLGITIMERSSFEKNPIDFLEAKGYK | | |
| | | EVKKDLIIKLPKYSLFELENGRKRMLASARFLQKGNELALPSKYVNFLYLASHYEKLKGSPEDNEQ | | |
| | | KQLFVEQHKHYLDEIIEQISEFSKRVILADANLDKVLSAYNKHRDKPIREQAENIIHLFTLTNLGA | | |
| | | PRAFKYFDTTIDRKVYRSTKEVLDATLIHQSITGLYETRIDLSQLGGD | | |
| St1Cas9- | Strepto- | MSDLVLGLDIGIGSVGVGILNKVTGEIIHKNSRIFPAAQAENNLVRRTNRQGRRLARRKKHRRVRL | N622A | 1982 |
| CNRZ1066 | coccus | NRLFEESGLITDFTKISINLNPYQLRVKGLTDELSNEELFIALKNMVKHRGISYLDDASDDGNSSV | | |
| | thermophilus | GDYAQIVKENSKQLETKTPGQIQLERYQTYGQLRGDFTVEKDGKKHRLINVFPTSAYRSEALRILQ | | |
| | | TQQEFNPQITDEFINRYLEILTGKRKYYHGPGNEKSRTDYGRYRTSGETLDNIFGILIGKCTFYPD | | |
| | | EFRAAKASYTAQEFNLLNDLNNLTVPTETKKLSKEQKNQIINYVKNEKAMGPAKLFKYIAKLLSCD | | |
| | | VADIKGYRIDKSGKAEIHTFEAYRKMKTLETLDIEQMDRETLDKLAYVLTLNTEREGIQEALEHEF | | |
| | | ADGSFSQKQVDELVQFRKANSSIFGKGWHNFSVKLMMELIPELYETSEEQMTILTRLGKQKTTSSS | | |
| | | NKTKYIDEKLLTEEIYNPVVAKSVRQAIKIVNAAIKEYGDFDNIVIEMARETNEDDEKKAIQKIQK | | |
| | | ANKDEKDAAMLKAANQYNGKAELPHSVFHGHKQLATKIRLWHQQGERCLYTGKTISIHDLINNSNQ | | |
| | | FEVDHILPLSITFDDSLANKVLVYATANQEKGQRTPYQALDSMDDAWSFRELKAFVRESKTLSNKK | | |
| | | KEYLLTEEDISKFDVRKKFIERNLVDTRYASRVVLNALQEHFRAHKIDTKVSVVRGQFTSQLRRHW | | |
| | | GIEKTRDTYHHHAVDALIIAASSQLNLWKKQKNTLVSYSEEQLLDIETGELISDDEYKESVFKAPY | | |
| | | QHFVDTLKSKEFEDSILFSYQVDSKFNRKISDATIYATRQAKVGKDKKDETYVLGKIKDIYTQDGY | | |
| | | DAFMKIYKKDKSKFLMYRHDPQTFEKVIEPILENYPNKQMNEKGKEVPCNPFLKYKEEHGYIRKYS | | |
| | | KKGNGPEIKSLKYYDSKLLGNPIDITPENSKNKVVLQSLKPWRTDVYFNKATGKYEILGLKYADLQ | | |
| | | FEKGTGTYKISQEKYNDIKKKEGVDSDSEFKFTLYKNDLLLVKDTETKEQQLFRFLSRTLPKQKHY | | |
| | | VELKPYDKQKFEGGEALIKVLGNVANGGQCIKGLAKSNISIYKVRTDVLGNQHIIKNEGDKPKLDF | | |
| St1Cas9- | Strepto- | MSDLVLGLDIGIGSVGVGILNKVTGEIIHKNSRIFPAAQAENNLVRRTNRQGRRLARRKKHRRVRL | N622A | 1983 |
| LMG1831 | coccus | NRLFEESGLITDFTKISINLNPYQLRVKGLTDELSNEELFIALKNMVKHRGISYLDDASDDGNSSV | | |
| | thermophilus | GDYAQIVKENSKQLETKTPGQIQLERYQTYGQLRGDFTVEKDGKKHRLINVFPTSAYRSEALRILQ | | |
| | | TQQEFNPQITDEFINRYLEILTGKRKYYHGPGNEKSRTDYGRYRTSGETLDNIFGILIGKCTFYPD | | |
| | | EFRAAKASYTAQEFNLLNDLNNLTVPTETKKLSKEQKNQIINYVKNEKAMGPAKLFKYIAKLLSCD | | |
| | | VADIKGYRIDKSGKAEIHTFEAYRKMKTLETLDIEQMDRETLDKLAYVLTLNTEREGIQEALEHEF | | |
| | | ADGSFSQKQVDELVQFRKANSSIFGKGWHNFSVKLMMELIPELYETSEEQMTILTRLGKQKTTSSS | | |
| | | NKTKYIDEKLLTEEIYNPVVAKSVRQAIKIVNAAIKEYGDFDNIVIEMARETNEDDEKKAIQKIQK | | |
| | | ANKDEKDAAMLKAANQYNGKAELPHSVFHGHKQLATKIRLWHQQGERCLYTGKTISIHDLINNSNQ | | |
| | | FEVDHILPLSITFDDSLANKVLVYATANQEKGQRTPYQALDSMDDAWSFRELKAFVRESKTLSNKK | | |
| | | KEYLLTEEDISKFDVRKKFIERNLVDTRYASRVVLNALQEHFRAHKIDTKVSVVRGQFTSQLRRHW | | |
| | | GIEKTRDTYHHHAVDALIIAASSQLNLWKKQKNTLVSYSEEQLLDIETGELISDDEYKESVFKAPY | | |
| | | QHFVDTLKSKEFEDSILFSYQVDSKFNRKISDATIYATRQAKVGKDKKDETYVLGKIKDIYTQDGY | | |
| | | DAFMKIYKKDKSKFLMYRHDPQTFEKVIEPILENYPNKQMNEKGKEVPCNPFLKYKEEHGYIRKYS | | |
| | | KKGNGPEIKSLKYYDSKLLGNPIDITPENSKNKVVLQSLKPWRTDVYFNKNTGKYEILGLKYADLQ | | |
| | | FEKKTGTYKISQEKYNGIMKEEGVDSDSEFKFTLYKNDLLLVKDTETKEQQLFRFLSRTMPNVKYY | | |
| | | VELKPYSKDKFEKNESLIEILGSADKSGRCIKGLGKSNISIYKVRTDVLGNQHIIKNEGDKPKLDF | | |
| St1Cas9- | Strepto- | MSDLVLGLDIGIGSVGVGILNKVTGEIIHKNSRIFPAAQAENNLVRRTNRQGRRLARRKKHRRVRL | N622A | 1984 |
| MTH17C | coccus | NRLFEESGLITDFTKISINLNPYQLRVKGLTDELSNEELFIALKNMVKHRGISYLDDASDDGNSSV | | |
| L396 | thermophilus | GDYAQIVKENSKQLETKTPGQIQLERYQTYGQLRGDFTVEKDGKKHRLINVFPTSAYRSEALRILQ | | |
| | | TQQEFNPQITDEFINRYLEILTGKRKYYHGPGNEKSRTDYGRYRTSGETLDNIFGILIGKCTFYPD | | |
| | | EFRAAKASYTAQEFNLLNDLNNLTVPTETKKLSKEQKNQIINYVKNEKAMGPAKLFKYIAKLLSCD | | |
| | | VADIKGYRIDKSGKAEIHTFEAYRKMKTLETLDIEQMDRETLDKLAYVLTLNTEREGIQEALEHEF | | |
| | | ADGSFSQKQVDELVQFRKANSSIFGKGWHNFSVKLMMELIPELYETSEEQMTILTRLGKQKTTSSS | | |
| | | NKTKYIDEKLLTEEIYNPVVAKSVRQAIKIVNAAIKEYGDFDNIVIEMARETNEDDEKKAIQKIQK | | |
| | | ANKDEKDAAMLKAANQYNGKAELPHSVFHGHKQLATKIRLWHQQGERCLYTGKTISIHDLINNSNQ | | |
| | | FEVDHILPLSITFDDSLANKVLVYATANQEKGQRTPYQALDSMDDAWSFRELKAFVRESKTLSNKK | | |
| | | KEYLLTEEDISKFDVRKKFIERNLVDTRYASRVVLNALQEHFRAHKIDTKVSVVRGQFTSQLRRHW | | |
| | | GIEKTRDTYHHHAVDALIIAASSQLNLWKKQKNTLVSYSEDQLLDIETGELISDDEYKESVFKAPY | | |
| | | QHFVDTLKSKEFEDSILFSYQVDSKFNRKISDATIYATRQAKVGKDKADETYVLGKIKDIYTQDGY | | |
| | | DAFMKIYKKDKSKFLMYRHDPQTFEKVIEPILENYPNKQINEKGKEVPCNPFLKYKEEHGYIRKYS | | |
| | | KKGNGPEIKSLKYYDSKLGNHIDITPKDSNNKVVLQSLKPWRTDVYFNKNTGKYEILGLKYSDMQF | | |
| | | EKGTGKYSISKEQYENIKVREGVDENSEFKFTLYKNDLLLLKDSENGEQILLRFTSRNDTSKHYVE | | |
| | | LKPYNRQKFEGSEYLIKSLGTVAKGGQCIKGLGKSNISIYKVRTDVLGNQHIIKNEGDKPKLDF | | |
| St1Cas9- | Strepto- | MSDLVLGLDIGIGSVGVGILNKVTGEIIHKNSRIFPAAQAENNLVRRTNRQGRRLARRKKHRRVRL | N622A | 1985 |
| TH1477 | coccus | NRLFEESGLITDFTKISINLNPYQLRVKGLTDELSNEELFIALKNMVKHRGISYLDDASDDGNSSV | | |
| | thermophilus | GDYAQIVKENSKQLETKTPGQIQLERYQTYGQLRGDFTVEKDGKKHRLINVFPTSAYRSEALRILQ | | |
| | | TQQEFNPQITDEFINRYLEILTGKRKYYHGPGNEKSRTDYGRYRTSGETLDNIFGILIGKCTFYPD | | |
| | | EFRAAKASYTAQEFNLLNDLNNLTVPTETKKLSKEQKNQIINYVKNEKAMGPAKLFKYIAKLLSCD | | |
| | | VADIKGYRIDKSGKAEIHTFEAYRKMKTLETLDIEQMDRETLDKLAYVLTLNTEREGIQEALEHEF | | |
| | | ADGSFSQKQVDELVQFRKANSSIFGKGWHNFSVKLMMELIPELYETSEEQMTILTRLGKQKTTSSS | | |
| | | NKTKYIDEKLLTEEIYNPVVAKSVRQAIKIVNAAIKEYGDFDNIVIEMARETNEDDEKKAIQKIQK | | |
| | | ANKDEKDAAMLKAANQYNGKAELPHSVFHGHKQLATKIRLWHQQGERCLYTGKTISIHDLINNSNQ | | |
| | | FEVDHILPLSITFDDSLANKVLVYATANQEKGQRTPYQALDSMDDAWSFRELKAFVRESKTLSNKK | | |
| | | KEYLLTEEDISKFDVRKKFIERNLVDTRYASRVVLNALQEHFRAHKIDTKVSVVRGQFTSQLRRHW | | |
| | | GIEKTRDTYHHHAVDALIIAASSQLNLWKKQKNTLVSYSEDQLLDIETGELISDDEYKESVFKAPY | | |
| | | QHFVDTLKSKEFEDSILFSYQVDSKFNRKISDATIYATRQAKVGKDKADETYVLGKIKDIYTQDGY | | |
| | | DAFMKIYKKDKSKFLMYRHDPQTFEKVIEPILENYPNKQINEKGKEVPCNPFLKYKEEHGYIRKYS | | |
| | | KKGNGPEIKSLKYYDSKLGNHIDITPKDSNNKVVLQSLKPWRTDVYFNKNTGKYEILGLKYSDMQF | | |
| | | EKGTGKYSISKEQYENIKVREGVDENSEFKFTLYKNDLLLLKDSENGEQILLRFTSRNDTSKHYVE | | |
| | | LKPYNRQKFEGSEYLIKSLGTVVKGGRCIKGLGKSNISIYKVRTDVLGNQHIIKNEGDKPKLDF | | |

Table 40B provides parameters to define the necessary components for designing gRNA and/or Template RNAs to apply Cas variants listed in Table 3A for Gene Writing. Tier indicates preferred Cas variants if they are available for use at a given locus. The cut site indicates the validated or predicted protospacer adjacent motif (PAM) requirements, validated or predicted location of cut site (relative to the most upstream base of the PAM site). The gRNA for a given enzyme can be assembled by concatenating the crRNA, Tetraloop, and tracrRNA sequences, and further adding a 5′ spacer of a length within Spacer (min) and Spacer (max) that matches a protospacer at a target site. Further, the predicted location of the ssDNA nick at the target is important for designing the 3′ region of a Template RNA that needs to anneal to the sequence immediately 5′ of the nick in order to initiate target primed reverse transcription.

TABLE 40B
parameters to define the necessary components for designing gRNA and/or
Template RNAs to apply Cas variants listed in Table 40A for Gene Writing

| | | | | Spacer | Spacer | | Tetra- | |
|---|---|---|---|---|---|---|---|---|
| Variant | PAM(s) | Cut | Tier | (min) | (max) | crRNA | loop | tracrRNA |
| Nme2Cas9 | NNNNCC | -3 | 1 | 22 | 24 | GTTGTAGCTCC | GAAA | CGAAATGAGAACC |
| | | | | | | CTTTCTCATTT | | GTTGCTACAATAAG |
| | | | | | | CG (SEQ ID NO: | | GCCGTCTGAAAAG |
| | | | | | | 386) | | ATGTGCCGCAACGC |
| | | | | | | | | TCTGCCCCTTAAAG |
| | | | | | | | | CTTCTGCTTTAAGG |
| | | | | | | | | GGCATCGTTTA |
| | | | | | | | | (SEQ ID NO: 387) |
| PpnCas9 | NNNNRTT | | 1 | 21 | 24 | GTTGTAGCTCC | GAAA | GCGAAATGAAAAA |
| | | | | | | CTTTTTCATTT | | CGTTGTTACAATAA |
| | | | | | | CGC (SEQ ID | | GAGATGAATTTCTC |
| | | | | | | NO: 388) | | GCAAAGCTCTGCCT |
| | | | | | | | | CTTGAAATTTCGGT |
| | | | | | | | | TTCAAGAGGCATCT |
| | | | | | | | | TTTT (SEQ ID NO: |
| | | | | | | | | 389) |
| SauCas9 | NNGRR; | -3 | 1 | 21 | 23 | GTTTTAGTACT | GAAA | CAGAATCTACTAAA |
| | NNGRRT | | | | | CTG (SEQ ID | | ACAAGGCAAAATG |
| | | | | | | NO: 390) | | CCGTGTTTATCTCG |
| | | | | | | | | TCAACTTGTTGGCG |
| | | | | | | | | AGA (SEQ ID NO: |
| | | | | | | | | 391) |
| SauCas9- | NNNRR; | -3 | 1 | 21 | 21 | GTTTTAGTACT | GAAA | ATTACAGAATCTAC |
| KKH | NNNRRT | | | | | CTGTAAT (SEQ | | TAAAACAAGGCAA |
| | | | | | | ID NO: 392) | | AATGCCGTGTTTAT |
| | | | | | | | | CTCGTCAACTTGTT |
| | | | | | | | | GGCGAGA (SEQ ID |
| | | | | | | | | NO: 393) |
| SauriCas9 | NNGG | -3 | 1 | 21 | 21 | GTTTTAGTACT | GAAA | CAGAATCTACTAAA |
| | | | | | | CTG (SEQ ID | | ACAAGGCAAAATG |
| | | | | | | NO: 394) | | CCGTGTTTATCTCG |
| | | | | | | | | TCAACTTGTTGGCG |
| | | | | | | | | AGATTTTT (SEQ ID |
| | | | | | | | | NO: 395) |
| SauriCas9- | NNRG | -3 | 1 | 21 | 21 | GTTTTAGTACT | GAAA | CAGAATCTACTAAA |
| KKH | | | | | | CTG (SEQ ID | | ACAAGGCAAAATG |
| (SEQ ID | | | | | | NO: 396) | | CCGTGTTTATCTCG |
| NO: 401) | | | | | | | | TCAACTTGTTGGCG |
| | | | | | | | | AGATTTTT (SEQ ID |
| | | | | | | | | NO: 397) |
| ScaCas9- | NNG | -3 | 1 | 20 | 20 | GTTTTAGAGCT | GAAA | TAGCAAGTTAAAAT |
| Sc++ | | | | | | A (SEQ ID NO: | | AAGGCTAGTCCGTT |
| | | | | | | 398) | | ATCAACTTGAAAAA |
| | | | | | | | | GTGGCACCGAGTCG |
| | | | | | | | | GTGC (SEQ ID NO: |
| | | | | | | | | 399) |
| SpyCas9 | NGG | -3 | 1 | 20 | 20 | GTTTTAGAGCT | GAAA | TAGCAAGTTAAAAT |
| | | | | | | A (SEQ ID NO: | | AAGGCTAGTCCGTT |
| | | | | | | 400) | | ATCAACTTGAAAAA |
| | | | | | | | | GTGGCACCGAGTCG |
| | | | | | | | | GTGC (SEQ ID NO: |
| | | | | | | | | 401) |
| SpyCas9- | NG | -3 | 1 | 20 | 20 | GTTTAAGAGCT | GAAA | CAGCATAGCAAGTT |
| NG | (NGG = | | | | | ATGCTG (SEQ | | TAAATAAGGCTAGT |
| | NGA = NGT > | | | | | ID NO: 402) | | CCGTTATCAACTTG |
| | NGC) | | | | | | | AAAAAGTGGCACC |
| | | | | | | | | GAGTCGGTGC (SEQ |
| | | | | | | | | ID NO: 403) |
| SpyCas9- | NRN > NYN | -3 | 1 | 20 | 20 | GTTTTAGAGCT | GAAA | TAGCAAGTTAAAAT |
| SpRY | | | | | | A (SEQ ID NO: | | AAGGCTAGTCCGTT |
| | | | | | | 404) | | ATCAACTTGAAAAA |
| | | | | | | | | GTGGCACCGAGTCG |
| | | | | | | | | GTGC (SEQ ID NO: |
| | | | | | | | | 405) |
| St1Cas9 | NNAGAAW > | -3 | 1 | 20 | 20 | GTCTTTGTACT | GTAC | CAGAAGCTACAAA |
| | NNAGGAW = | | | | | CTG (SEQ ID | | GATAAGGCTTCATG |
| | NNGGAAW | | | | | NO: 407) | | CCGAAATCAACACC |
| | | | | | | | | CTGTCATTTTATGG |
| | | | | | | | | CAGGGTGTTTT |
| | | | | | | | | (SEQ ID NO: 406) |
| BlatCas9 | NNNNCNAA > | -3 | 1 | 19 | 23 | GCTATAGTTCC | GAAA | GGTAAGTTGCTATA |
| | NNNNCNDD > | | | | | TTACT (SEQ ID | | GTAAGGGCAACAG |
| | NNNNC | | | | | NO: 408) | | ACCCGAGGCGTTGG |
| | | | | | | | | GGATCGCCTAGCCC |
| | | | | | | | | GTGTTTACGGGCTC |
| | | | | | | | | TCCCCATATTCAAA |
| | | | | | | | | ATAATGACAGACG |
| | | | | | | | | AGCACCTTGGAGCA |
| | | | | | | | | TTTATCTCCGAGGT |
| | | | | | | | | GCT (SEQ ID NO: |
| | | | | | | | | 409) |
| cCas9- | NNVACT; | -3 | 2 | 21 | 21 | GUCUUAGUAC | GAAA | CAGAAUCUACUAA |
| v16 | NNVATGM; | | | | | UCUG (SEQ ID | | GACAAGGCAAAAU |
| | NNVATT; | | | | | NO: 410) | | GCCGUGUUUAUCU |
| | NNVGCT; | | | | | | | CGUCAACUUGUUG |
| | NNVGTG; | | | | | | | GCGAGAUUUUUUU |
| | NNVGTT | | | | | | | (SEQ ID NO: 411) |
| cCas9- | NNVRRN | -3 | 2 | 21 | 21 | GUCUUAGUAC | GAAA | CAGAAUCUACUAA |
| v17 | | | | | | UCUG (SEQ ID | | GACAAGGCAAAAU |
| | | | | | | NO: 412) | | GCCGUGUUUAUCU |
| | | | | | | | | CGUCAACUUGUUG |
| | | | | | | | | GCGAGAUUUUUUU |
| | | | | | | | | (SEQ ID NO: 413) |
| cCas9- | NNVACT; | -3 | 2 | 21 | 21 | GUCUUAGUAC | GAAA | CAGAAUCUACUAA |
| v21 | NNVATGM; | | | | | UCUG (SEQ ID | | GACAAGGCAAAAU |
| | NNVATT; | | | | | NO: 414) | | GCCGUGUUUAUCU |
| | NNVGCT; | | | | | | | CGUCAACUUGUUG |
| | NNVGTG; | | | | | | | GCGAGAUUUUUUU |
| | NNVGTT | | | | | | | (SEQ ID NO: 415) |
| cCas9- | NNVRRN | -3 | 2 | 21 | 21 | GUCUUAGUAC | GAAA | CAGAAUCUACUAA |
| v42 | | | | | | UCUG (SEQ ID | | GACAAGGCAAAAU |
| | | | | | | NO: 416) | | GCCGUGUUUAUCU |
| | | | | | | | | CGUCAACUUGUUG |
| | | | | | | | | GCGAGAUUUUUUU |
| | | | | | | | | (SEQ ID NO: 417) |
| CdiCas9 | NNRHHHY; | | 2 | 22 | 22 | ACUGGGGUUC | GAAA | CUGAACCUCAGUA |
| | NNRAAAY | | | | | AG (SEQ ID NO: | | AGCAUUGGCUCGU |
| | | | | | | 418) | | UUCCAAUGUUGAU |
| | | | | | | | | UGCUCCGCCGGUG |
| | | | | | | | | CUCCUUAUUUUUA |
| | | | | | | | | AGGGCGCCGGC |
| | | | | | | | | (SEQ ID NO: 419) |
| CjeCas9 | NNNNRYAC | -3 | 2 | 21 | 23 | GTTTTAGTCCC | GAAA | AGGGACTAAAATA |
| | | | | | | T (SEQ ID NO: | | AAGAGTTTGCGGG |
| | | | | | | 420) | | ACTCTGCGGGGTTA |
| | | | | | | | | CAATCCCCTAAAAC |
| | | | | | | | | CGCTTTTTT (SEQ |
| | | | | | | | | ID NO: 424) |
| GeoCas9 | NNNNCRAA | | 2 | 21 | 23 | GUCAUAGUUC | GAAA | UCAGGGUUACUAU |
| | | | | | | CCCUGA (SEQ | | GAUAAGGGCUUUC |
| | | | | | | ID NO: 421) | | UGCCUAAGGCAGA |
| | | | | | | | | CUGACCCGCGGCG |
| | | | | | | | | UUGGGGAUCGCCU |
| | | | | | | | | GUCGCCCGCUUUU |
| | | | | | | | | GGCGGGCAUUCCC |
| | | | | | | | | CAUCCUU(SEQ ID |
| | | | | | | | | NO: 422) |
| iSpyMac | NAAN | -3 | 2 | 19 | 21 | GTTTTAGAGCT | GAAA | TAGCAAGTTAAAAT |
| Cas9 | | | | | | A (SEQ ID NO: | | AAGGCTAGTCCGTT |
| | | | | | | 423) | | ATCAACTTGAAAAA |
| | | | | | | | | GTGGCACCGAGTCG |
| | | | | | | | | GTGC (SEQ ID NO: |
| | | | | | | | | 44) |
| NmeCas9 | NNNNGAYT; | -3 | 2 | 20 | 24 | GTTGTAGCTCC | GAAA | CGAAATGAGAACC |
| | NNNNGYTT; | | | | | CTTTCTCATTT | | GTTGCTACAATAAG |
| | NNNNGAYA; | | | | | CG (SEQ ID NO: | | GCCGTCTGAAAAG |
| | NNNNGTCT | | | | | 425) | | ATGTGCCGCAACGC |
| | | | | | | | | TCTGCCCCTTAAAG |
| | | | | | | | | CTTCTGCTTTAAGG |
| | | | | | | | | GGCATCGTTTA |
| | | | | | | | | (SEQ ID NO: 426) |
| ScaCas9 | NNG | -3 | 2 | 20 | 20 | GTTTTAGAGCT | GAAA | TAGCAAGTTAAAAT |
| | | | | | | A (SEQ ID NO: | | AAGGCTAGTCCGTT |
| | | | | | | 427) | | ATCAACTTGAAAAA |
| | | | | | | | | GTGGCACCGAGTCG |
| | | | | | | | | GTGC (SEQ ID NO: |
| | | | | | | | | 428) |
| ScaCas9- | NNG | -3 | 2 | 20 | 20 | GTTTTAGAGCT | GAAA | TAGCAAGTTAAAAT |
| HiFi- | | | | | | A (SEQ ID NO: | | AAGGCTAGTCCGTT |
| Sc++ | | | | | | 429) | | ATCAACTTGAAAAA |
| | | | | | | | | GTGGCACCGAGTCG |
| | | | | | | | | GTGC (SEQ ID NO: |
| | | | | | | | | 430) |
| SpyCas9- | NRRH | -3 | 2 | 20 | 20 | GTTTAAGAGCT | GAAA | CAGCATAGCAAGTT |
| 3var- | | | | | | ATGCTG (SEQ | | TAAATAAGGCTAGT |
| NRRH | | | | | | ID NO: 431) | | CCGTTATCAACTTG |
| | | | | | | | | AAAAAGTGGCACC |
| | | | | | | | | GAGTCGGTGC (SEQ |
| | | | | | | | | ID NO: 432) |
| SpyCas9- | NRTH | -3 | 2 | 20 | 20 | GTTTAAGAGCT | GAAA | CAGCATAGCAAGTT |
| 3var- | | | | | | ATGCTG (SEQ | | TAAATAAGGCTAGT |
| NRTH | | | | | | ID NO: 433) | | CCGTTATCAACTTG |
| | | | | | | | | AAAAAGTGGCACC |
| | | | | | | | | GAGTCGGTGC (SEQ |
| | | | | | | | | ID NO: 434) |
| SpyCas9- | NRCH | -3 | 2 | 20 | 20 | GTTTAAGAGCT | GAAA | CAGCATAGCAAGTT |
| 3var- | | | | | | ATGCTG (SEQ | | TAAATAAGGCTAGT |
| NRCH | | | | | | ID NO: 435) | | CCGTTATCAACTTG |
| | | | | | | | | AAAAAGTGGCACC |
| | | | | | | | | GAGTCGGTGC (SEQ |
| | | | | | | | | ID NO: 436) |
| SpyCas9- | NGG | -3 | 2 | 20 | 20 | GTTTTAGAGCT | GAAA | TAGCAAGTTAAAAT |
| HF1 | | | | | | A (SEQ ID NO: | | AAGGCTAGTCCGTT |
| | | | | | | 437) | | ATCAACTTGAAAAA |
| | | | | | | | | GTGGCACCGAGTCG |
| | | | | | | | | GTGC (SEQ ID NO: |
| | | | | | | | | 438) |
| SpyCas9- | NAAG | -3 | 2 | 20 | 20 | GTTTTAGAGCT | GAAA | TAGCAAGTTAAAAT |
| QQR1 | | | | | | A (SEQ ID NO: | | AAGGCTAGTCCGTT |
| | | | | | | 439) | | ATCAACTTGAAAAA |
| | | | | | | | | GTGGCACCGAGTCG |
| | | | | | | | | GTGC (SEQ ID NO: |
| | | | | | | | | 440) |
| SpyCas9- | NGN | -3 | 2 | 20 | 20 | GTTTTAGAGCT | GAAA | TAGCAAGTTAAAAT |
| SpG | | | | | | A (SEQ ID NO: | | AAGGCTAGTCCGTT |
| | | | | | | 441) | | ATCAACTTGAAAAA |
| | | | | | | | | GTGGCACCGAGTCG |
| | | | | | | | | GTGC (SEQ ID NO: |
| | | | | | | | | 442) |
| SpyCas9- | NGAN | -3 | 2 | 20 | 20 | GTTTTAGAGCT | GAAA | TAGCAAGTTAAAAT |
| VQR | | | | | | A (SEQ ID NO: | | AAGGCTAGTCCGTT |
| | | | | | | 443) | | ATCAACTTGAAAAA |
| | | | | | | | | GTGGCACCGAGTCG |
| | | | | | | | | GTGC (SEQ ID NO: |
| | | | | | | | | 444) |
| SpyCas9- | NGCG | -3 | 2 | 20 | 20 | GTTTTAGAGCT | GAAA | TAGCAAGTTAAAAT |
| VRER | | | | | | A (SEQ ID NO: | | AAGGCTAGTCCGTT |
| | | | | | | 445) | | ATCAACTTGAAAAA |
| | | | | | | | | GTGGCACCGAGTCG |
| | | | | | | | | GTGC (SEQ ID NO: |
| | | | | | | | | 446) |
| SpyCas9- | NG; GAA; | -3 | 2 | 20 | 20 | GTTTAAGAGCT | GAAA | CAGCATAGCAAGTT |
| xCas | GAT | | | | | ATGCTG (SEQ | | TAAATAAGGCTAGT |
| | | | | | | ID NO: 447) | | CCGTTATCAACTTG |
| | | | | | | | | AAAAAGTGGCACC |
| | | | | | | | | GAGTCGGTGC (SEQ |
| | | | | | | | | ID NO: 448) |
| SpyCas9- | NG | -3 | 2 | 20 | 20 | GTTTAAGAGCT | GAAA | CAGCATAGCAAGTT |
| xCas-NG | | | | | | ATGCTG (SEQ | | TAAATAAGGCTAGT |
| | | | | | | ID NO: 449) | | CCGTTATCAACTTG |
| | | | | | | | | AAAAAGTGGCACC |
| | | | | | | | | GAGTCGGTGC (SEQ |
| | | | | | | | | ID NO: 450) |
| St1Cas9- | NNACAA | -3 | 2 | 20 | 20 | GTCTTTGTACT | GTAC | CAGAAGCTACAAA |
| CNRZ1066 | | | | | | CTG (SEQ ID | | GATAAGGCTTCATG |
| | | | | | | NO: 451) | | CCGAAATCAACACC |
| | | | | | | | | CTGTCATTTTATGG |
| | | | | | | | | CAGGGTGTTTT |
| | | | | | | | | (SEQ ID NO: 452) |
| St1Cas9- | NNGCAA | -3 | 2 | 20 | 20 | GTCTTTGTACT | GTAC | CAGAAGCTACAAA |
| LMG1831 | | | | | | CTG (SEQ ID | | GATAAGGCTTCATG |
| | | | | | | NO: 453) | | CCGAAATCAACACC |
| | | | | | | | | CTGTCATTTTATGG |
| | | | | | | | | CAGGGTGTTTT |
| | | | | | | | | (SEQ ID NO: 454) |
| St1Cas9- | NNAAAA | -3 | 2 | 20 | 20 | GTCTTTGTACT | GTAC | CAGAAGCTACAAA |
| MTH17C | | | | | | CTG (SEQ ID | | GATAAGGCTTCATG |
| L396 | | | | | | NO: 455) | | CCGAAATCAACACC |
| | | | | | | | | CTGTCATTTTATGG |
| | | | | | | | | CAGGGTGTTTT |
| | | | | | | | | (SEQ ID NO: 456) |
| St1Cas9- | NNGAAA | -3 | 2 | 20 | 20 | GTCTTTGTACT | GTAC | CAGAAGCTACAAA |
| TH1477 | | | | | | CTG (SEQ ID | | GATAAGGCTTCATG |
| | | | | | | NO: 457) | | CCGAAATCAACACC |
| | | | | | | | | CTGTCATTTTATGG |
| | | | | | | | | CAGGGTGTTTT |
| | | | | | | | | (SEQ ID NO: 458) |

[0198] In some embodiments, an endonuclease domain or DNA binding domain (e.g., as described herein) comprises a Cas domain, e.g., a Cas9 domain. In embodiments, the endonuclease domain or DNA binding domain comprises a nuclease-active Cas domain, a Cas nickase (nCas) domain, or a nuclease-inactive Cas (dCas) domain. In embodiments, the endonuclease domain or DNA binding domain comprises a nuclease-active Cas9 domain, a Cas9 nickase (nCas9) domain, or a nuclease-inactive Cas9 (dCas9) domain. In some embodiments, the endonuclease domain or DNA binding domain comprises a Cas9 domain of Cas9 (e.g., dCas9 and nCas9), Cas12a/Cpf1, Cas12b/C2c1, Cas12c/C2c3, Cas12d/CasY, Cas12e/CasX, Cas12g, Cas12h, or Cas12i. In some embodiments, the endonuclease domain or DNA binding domain comprises a Cas9 (e.g., dCas9 and nCas9), Cas12a/Cpf1, Cas12b/C2c1, Cas12c/C2c3, Cas12d/CasY, Cas12e/CasX, Cas12g, Cas12h, or Cas12i. In some embodiments, the endonuclease domain or DNA binding domain comprises an S. pyogenes or an S. thermophilus Cas9, or a functional fragment thereof. In some embodiments, the endonuclease domain or DNA binding domain comprises a Cas9 sequence, e.g., as described in Chylinski, Rhun, and Charpentier (2013) RNA Biology 10:5, 726-737; incorporated herein by reference. In some embodiments, the endonuclease domain or DNA binding domain comprises the HNH nuclease subdomain and/or the RuvC1 subdomain of a Cas, e.g., Cas9, e.g., as described herein, or a variant thereof. In some embodiments, the endonuclease domain or DNA binding domain comprises Cas12a/Cpf1, Cas12b/C2c1, Cas12c/C2c3, Cas12d/CasY, Cas12e/CasX, Cas12g, Cas12h, or Cas12i. In some embodiments, the endonuclease domain or DNA binding domain comprises a Cas polypeptide (e.g., enzyme), or a functional fragment thereof. In embodiments, the Cas polypeptide (e.g., enzyme) is selected from Cas1, Cas1B, Cas2, Cas3, Cas4, Cas5, Cas5d, Cas5t, Cas5h, Cas5a, Cas6, Cas7, Cas8, Cas8a, Cas8b, Cas8c, Cas9 (e.g., Csn1 or Csx12), Cas10, Cas10d, Cas12a/Cpf1, Cas12b/C2c1, Cas12c/C2c3, Cas12d/CasY, Cas12e/CasX, Cas12g, Cas12h, Cas12i, Csy1, Csy2, Csy3, Csy4, Cse1, Cse2, Cse3, Cse4, Cse5e, Csc1, Csc2, Csa5, Csn1, Csn2, Csm1, Csm2, Csm3, Csm4, Csm5, Csm6, Cmr1, Cmr3, Cmr4, Cmr5, Cmr6, Csb1, Csb2, Csb3, Csx17, Csx14, Csx10, Csx16, CsaX, Csx3, Csx1, Csx1S, Csx11, Csf1, Csf2, CsO, Csf4, Csd1, Csd2, Cst1, Cst2, Csh1, Csh2, Csa1, Csa2, Csa3, Csa4, Csa5, Type II Cas effector proteins, Type V Cas effector proteins, Type VI Cas effector proteins, CARF, DinG, Cpf1, Cas12b/C2c1, Cas12c/C2c3, Cas12b/C2c1, Cas12c/C2c3, SpCas9(K855A), eSpCas9(1.1), SpCas9-HF1, hyper accurate Cas9 variant (HypaCas9), homologues thereof, modified or engineered versions thereof, and/or functional fragments thereof. In embodiments, the Cas9 comprises one or more substitutions, e.g., selected from H840A, D10A, P475A, W476A, N477A, D1125A, W1126A, and D1127A. In embodiments, the Cas9 comprises one or more mutations at positions selected from: D10, G12, G17, E762, H840, N854, N863, H982, H983, A984, D986, and/or A987, e.g., one or more substitutions selected from D10A, G12A, G17A, E762A, H840A, N854A, N863A, H982A, H983A, A984A, and/or D986A. In some embodiments, the endonuclease domain or DNA binding domain comprises a Cas (e.g., Cas9) sequence from Corynebacterium ulcerans, Corynebacterium diphtheria, Spiroplasma syrphidicola, Prevotella intermedia, Spiroplasma taiwanense, Streptococcus iniae, Belliella baltica, Psychroflexus torquis, Streptococcus thermophilus, Listeria innocua, Campylobacter jejuni, Neisseria meningitidis, Streptococcus pyogenes, or Staphylococcus aureus, or a fragment or variant thereof.

[0199] In some embodiments, an endonuclease domain or DNA binding domain (e.g., as described herein) comprises a Cpf1 domain, e.g., comprising one or more substitutions, e.g., at position D917, E1006A, D1255 or any combination thereof, e.g., selected from D917A, E1006A, D1255A, D917A/E1006A, D917A/D1255A, E1006A/D1255A, and D917A/E1006A/D1255A.

[0200] In some embodiments, an endonuclease domain or DNA binding domain (e.g., as described herein) comprises spCas9, spCas9-VRQR (SEQ ID NO: 1696), spCas9-VRER (SEQ ID NO: 1697), xCas9 (sp), saCas9, saCas9-KKH, spCas9-MQKSER (SEQ ID NO: 1698), spCas9-LRKIQK (SEQ ID NO: 1699), or spCas9-LRVSQL (SEQ ID NO: 1700).

[0201] In some embodiments, an endonuclease domain or DNA binding domain (e.g., as described herein) comprises an amino acid sequence as listed in Table 37 below, or an amino acid sequence having at least 80%, 85%, 90%, 95%, 96%, 97%, 98%, or 99% sequence identity thereto. In some embodiments, the endonuclease domain or DNA-binding domain comprises an amino acid sequence that has no more than 1, 2, 3, 4, 5, 6, 7, 8, 9, 10, 11, 12, 13, 14, 15, 16, 17, 18, 19, 20, 21, 22, 23, 24, 25, 26, 27, 28, 29, 30, 31, 32, 33, 34, 35, 36, 37, 38, 39, 40, 41, 42, 43, 44, 45, 46, 47, 48, 49, or 50 differences (e.g., mutations) relative to any of the amino acid sequences described herein.

TABLE 37
Each of the Reference Sequences are incorporated by reference in their entirety.

| Name | Amino Acid Sequence or Reference Sequence |
|---|---|
| Streptococcus pyogenes | |
| Cas9 | |
| Exemplary Linker | SGSETPGTSESATPES (SEQ ID NO: 1023) |
| Exemplary Linker Motif | (SGGS)ₙ (SEQ ID NO: 1595) |
| Exemplary Linker Motif | (GGGS)ₙ (SEQ ID NO: 1596) |
| Exemplary Linker Motif | (GGGGS)ₙ (SEQ ID NO: 1535) |
| Exemplary Linker Motif | (G)ₙ |
| Exemplary Linker Motif | (EAAAK)ₙ (SEQ ID NO: 1534) |
| Exemplary Linker Motif | (GGS)ₙ |
| Exemplary Linker Motif | (XP)ₙ |
| Cas9 from Streptococcus | NCBI Reference Sequence: NC_002737.2 and Uniprot |
| pyogenes | Reference Sequence: Q99ZW2 |
| Cas9 from Corynebacterium | NCBI Refs: NC_015683.1, NC_017317.1 |
| ulcerans | |
| Cas9 from Corynebacterium | NCBI Refs: NC_016782.1, NC_016786.1 |
| diphtheria | |
| Cas9 from Spiroplasma | NCBI Ref: NC_021284.1 |
| syrphidicola | |
| Cas9 from Prevotella | NCBI Ref: NC_017861.1 |
| intermedia | |
| Cas9 from Spiroplasma | NCBI Ref: NC_021846.1 |
| taiwanense | |
| Cas9 from Streptococcus | NCBI Ref: NC_021314.1 |
| iniae | |
| Cas9 from Belliella baltica | NCBI Ref: NC_018010.1 |
| Cas9 from Psychroflexus | NCBI Ref: NC_018721.1 |
| torquisi | |
| Cas9 from Streptococcus | NCBI Ref: YP_820832.1 |
| thermophilus | |
| Cas9 from Listeria innocua | NCBI Ref: NP_472073.1 |
| Cas9 from Campylobacter | NCBI Ref: YP_002344900.1 |
| jejuni | |
| Cas9 from Neisseria | NCBI Ref: YP_002342100.1 |
| meningitidis | |
| dCas9 (D10A and H840A) | |
| Catalytically inactive Cas9 | |
| (dCas9) | |
| Cas9 nickase (nCas9) | |
| Catalytically active Cas9 | |
| CasY | ((ncbi.nlm.nih.gov/protein/APG80656.1) |
| | >APG80656.1 CRISPR-associated protein CasY [uncultured |
| | Parcubacteria group bacterium]) |
| CasX | uniprot.org/uniprot/F0NN87; uniprot.org/uniprot/F0NH53 |
| CasX | >tr\|F0NH53\|F0NH53_SULIR CRISPR associated protein, Casx |
| | OS = Sulfolobus islandicus (strain REY15A) GN = SiRe_0771 |
| | PE = 4 SV = 1 |
| Deltaproteobacteria CasX | |
| Cas12b/C2c1 | ((uniprot.org/uniprot/T0D7A2#2) sp\|T0D7A2\|C2C1_ALIAG |
| | CRISPR-associated endonuclease C2c1 OS = Alicyclobacillus |
| | acido-terrestris (strain ATCC 49025/DSM 3922/CIP 106132/ |
| | NCIMB 13137/GD3B) GN = c2c1 PE = 1 SV = 1) |
| BhCas12b (Bacillus | NCBI Reference Sequence: WP_095142515 |
| hisashii) | |
| BvCas12b (Bacillus sp. V3- | NCBI Reference Sequence: WP_101661451.1 |
| 13) | |
| Wild-type Francisella | |
| novicida Cpf1 | |
| Francisella novicida Cpf1 | |
| D917A | |
| Francisella novicida Cpf1 | |
| E1006A | |
| Francisella novicida Cpf1 | |
| D1255A | |
| Francisella novicida Cpf1 | |
| D917A/E1006A | |
| Francisella novicida Cpf1 | |
| D917A/D1255A | |
| Francisella novicida Cpf1 | |
| E1006A/D1255A | |
| Francisella novicida Cpf1 | |
| D917A/E1006A | |
| SaCas9 | |
| SaCas9n | |
| PAM-binding SpCas9 | |
| PAM-binding SpCas9n | |
| PAM-binding SpEQR Cas9 | |
| PAM-binding SpVQR Cas9 | |
| PAM-binding SpVRER | |
| Cas9 | |
| PAM-binding SpVRQR | |
| Cas9 | |
| SpyMacCas9 | |

[0202] In some embodiments, a Gene Writing polypeptide has an endonuclease domain comprising a Cas9 nickase, e.g., Cas9 H840A. In embodiments, the Cas9 H840A has the following amino acid sequence:

Cas9 nickase (H840A):
(SEQ ID NO: 1597)
DKKYSIGLDIGTNSVGWAVITDEYKVPSKKFKVLGNTDRHSIKKNLIGA
LLFDSGETAEATRLKRTARRRYTRRKNRICYLQEIFSNEMAKVDDSFFH
RLEESFLVEEDKKHERHPIFGNIVDEVAYHEKYPTIYHLRKKLVDSTDK
ADLRLIYLALAHMIKFRGHFLIEGDLNPDNSDVDKLFIQLVQTYNQLFE
ENPINASGVDAKAILSARLSKSRRLENLIAQLPGEKKNGLFGNLIALSL
GLTPNFKSNFDLAEDAKLQLSKDTYDDDLDNLLAQIGDQYADLFLAAKN
LSDAILLSDILRVNTEITKAPLSASMIKRYDEHHQDLTLLKALVRQQLP
EKYKEIFFDQSKNGYAGYIDGGASQEEFYKFIKPILEKMDGTEELLVKL
NREDLLRKQRTFDNGSIPHQIHLGELHAILRRQEDFYPFLKDNREKIEK
ILTFRIPYYVGPLARGNSRFAWMTRKSEETITPWNFEEVVDKGASAQSF
IERMTNFDKNLPNEKVLPKHSLLYEYFTVYNELTKVKYVTEGMRKPAFL
SGEQKKAIVDLLFKTNRKVTVKQLKEDYFKKIECFDSVEISGVEDRFNA
SLGTYHDLLKIIKDKDFLDNEENEDILEDIVLTLTLFEDREMIEERLKT
YAHLFDDKVMKQLKRRRYTGWGRLSRKLINGIRDKQSGKTILDFLKSDG
FANRNFMQLIHDDSLTFKEDIQKAQVSGQGDSLHEHIANLAGSPAIKKG
ILQTVKVVDELVKVMGRHKPENIVIEMARENQTTQKGQKNSRERMKRIE
EGIKELGSQILKEHPVENTQLQNEKLYLYYLQNGRDMYVDQELDINRLS
DYDVDAIVPQSFLKDDSIDNKVLTRSDKNRGKSDNVPSEEVVKKMKNYW
RQLLNAKLITQRKFDNLTKAERGGLSELDKAGFIKRQLVETRQITKHVA
QILDSRMNTKYDENDKLIREVKVITLKSKLVSDFRKDFQFYKVREINNY
HHAHDAYLNAVVGTALIKKYPKLESEFVYGDYKVYDVRKMIAKSEQEIG
KATAKYFFYSNIMNFFKTEITLANGEIRKRPLIETNGETGEIVWDKGRD
FATVRKVLSMPQVNIVKKTEVQTGGFSKESILPKRNSDKLIARKKDWDP
KKYGGFDSPTVAYSVLVVAKVEKGKSKKLKSVKELLGITIMERSSFEKN
PIDFLEAKGYKEVKKDLIIKLPKYSLFELENGRKRMLASAGELQKGNEL
ALPSKYVNFLYLASHYEKLKGSPEDNEQKQLFVEQHKHYLDEIIEQISE
FSKRVILADANLDKVLSAYNKHRDKPIREQAENIIHLFTLTNLGAPAAF
KYFDTTIDRKRYTSTKEVLDATLIHQSITGLYETRIDLSQLGGD

[0203] In some embodiments, a Gene Writing polypeptide comprises the RT domain from a retroviral reverse transcriptase, e.g., a wild-type M-MLV RT, e.g., comprising the following sequence:

M-MLV (WT):
(SEQ ID NO: 1598)
TLNIEDEYRLHETSKEPDVSLGSTWLSDFPQAWAETGGMGLAVRQAPLI
IPLKATSTPVSIKQYPMSQEARLGIKPHIQRLLDQGILVPCQSPWNTPL
LPVKKPGTNDYRPVQDLREVNKRVEDIHPTVPNPYNLLSGLPPSHQWYT
VLDLKDAFFCLRLHPTSQPLFAFEWRDPEMGISGQLTWTRLPQGFKNSP
TLFDEALHRDLADFRIQHPDLILLQYVDDLLLAATSELDCQQGTRALLQ
TLGNLGYRASAKKAQICQKQVKYLGYLLKEGQRWLTEARKETVMGQPTP
KTPRQLREFLGTAGFCRLWIPGFAEMAAPLYPLTKTGTLFNWGPDQQKA
YQEIKQALLTAPALGLPDLTKPFELFVDEKQGYAKGVLTQKLGPWRRPV
AYLSKKLDPVAAGWPPCLRMVAAIAVLTKDAGKLTMGQPLVILAPHAVE
ALVKQPPDRWLSNARMTHYQALLLDTDRVQFGPVVALNPATLLPLPEEG
LQHNCLDILAEAHGTRPDLTDQPLPDADHTWYTDGSSLLQEGQRKAGAA
VTTETEVIWAKALPAGTSAQRAELIALTQALKMAEGKKLNVYTDSRYAF
ATAHIHGEIYRRRGLLTSEGKEIKNKDEILALLKALFLPKRLSIIHCPG
HQKGHSAEARGNRMADQAARKAAITETPDTSTLLI

[0204] In some embodiments, a Gene Writing polypeptide comprises the RT domain from a retroviral reverse transcriptase, e.g., an M-MLV RT, e.g., comprising the following sequence:

(SEQ ID NO: 1556)
TLNIEDEHRLHETSKEPDVSLGSTWLSDFPQAWAETGGMGLAVRQAPLI
PLKATSTPVSIKQYPMSQEARLGIKPHIQRLLDQGILVPCQSPWNTPLL
PVKKPGTNDYRPVQDLREVNKRVEDIHPTVPNPYNLLSGLPPSHQWYTV
LDLKDAFFCLRLHPTSQPLFAFEWRDPEMGISGQLTWTRLPQGFKNSPT
LFDEALHRDLADFRIQHPDLILLQYVDDLLLAATSELDCQQGTRALLQT
LGNLGYRASAKKAQICQKQVKYLGYLLKEGQRWLTEARKETVMGQPTPK
TPRQLREFLGTAGFCRLWIPGFAEMAAPLYPLTKTGTLFNWGPDQQKAY
QEIKQALLTAPALGLPDLTKPFELFVDEKQGYAKGVLTQKLGPWRRPVA
YLSKKLDPVAAGWPPCLRMVAAIAVLTKDAGKLTMGQPLVILAPHAVEA
LVKQPPDRWLSNARMTHYQALLLDTDRVQFGPVVALNPATLLPLPEEGL
QHNCLDILAEAHGTRPDLTDQPLPDADHTWYTDGSSLLQEGQRKAGAAV
TTETEVIWAKALPAGTSAQRAELIALTQALKMAEGKKLNVYTDSRYAFA
TAHIHGEIYRRRGLLTSEGKEIKNKDEILALLKALFLPKRLSIIHCPGH
QKGHSAEARGNRMADQAARKAAITETPDTSTLL

[0205] In some embodiments, a Gene Writing polypeptide comprises the RT domain from a retroviral reverse transcriptase comprising the sequence of amino acids 659-1329 of NP_057933. In embodiments, the Gene Writing polypeptide further comprises one additional amino acid at the N-terminus of the sequence of amino acids 659-1329 of NP_057933, e.g., as shown below:

(SEQ ID NO: 1599)
TLNIEDEHRLHETSKEPDVSLGSTWLSDFPQAWAETGGMGLAVRQAPLI
PLKATSTPVSIKQYPMSQEARLGIKPHIQRLLDQGILVPCQSPWNTPLL
PVKKPGTNDYRPVQDLREVNKRVEDIHPTVPNPYNLLSGLPPSHQWYTV
LDLKDAFFCLRLHPTSQPLFAFEWRDPEMGISGQLTWTRLPQGFKNSPT
LFDEALHRDLADFRIQHPDLILLQYVDDLLLAATSELDCQQGTRALLQT
LGNLGYRASAKKAQICQKQVKYLGYLLKEGQRWLTEARKETVMGQPTPK
TPRQLREFLGTAGFCRLWIPGFAEMAAPLYPLTKTGTLFNWGPDQQKAY
QEIKQALLTAPALGLPDLTKPFELFVDEKQGYAKGVLTQKLGPWRRPVA
YLSKKLDPVAAGWPPCLRMVAAIAVLTKDAGKLTMGQPLVILAPHAVEA
LVKQPPDRWLSNARMTHYQALLLDTDRVQFGPVVALNPATLLPLPEEGL
QHNCLDILAEAHGTRPDLTDQPLPDADHTWYTDGSSLLQEGQRKAGAAV
TTETEVIWAKALPAGTSAQRAELIALTQALKMAEGKKLNVYTDSRYAFA
TAHIHGEIYRRRGLLTSEGKEIKNKDEILALLKALFLPKRLSIIHCPGH
QKGHSAEARGNRMADQAARKAA

Core RT (bold), annotated per above
RNAseH (underlined), annotated per above
In embodiments, the Gene Writing polypeptide further comprises one additional amino acid at the C-terminus of the sequence of amino acids 659-1329 of NP_057933. In embodiments, the Gene Writing polypeptide comprises an RNaseH1 domain (e.g., amino acids 1178-1318 of NP_057933).

[0206] In some embodiments, a retroviral reverse transcriptase domain, e.g., M-MLV RT, may comprise one or more mutations from a wild-type sequence that may improve features of the RT, e.g., thermostability, processivity, and/or template binding. In some embodiments, an M-MLV RT domain comprises, relative to the M-MLV (WT) sequence above, one or more mutations, e.g., selected from D200N, L603W, T330P, T306K, W313F, D524G, E562Q, D583N, P51L, S67R, E67K, T197A, H204R, E302K, F309N, L435G, N454K, H594Q, D653N, R110S, K103L, e.g., a combination of mutations, such as D200N, L603W, and T330P, optionally further including T306K and W313F. In some embodiments, an M-HLV RT used herein comprises the mutations D200N, L603W, T330P, T306K and W313F. In embodiments, the mutant M-MLV RT comprises the following amino acid sequence: M-ML V (PE2).

M-MLV (PE2):
(SEQ ID NO: 1600)
TLNIEDEYRLHETSKEPDVSLGSTWLSDFPQAWAETGGMGLAVRQAPLI
IPLKATSTPVSIKQYPMSQEARLGIKPHIQRLLDQGILVPCQSPWNTPL
LPVKKPGTNDYRPVQDLREVNKRVEDIHPTVPNPYNLLSGLPPSHQWYT
VLDLKDAFFCLRLHPTSQPLFAFEWRDPEMGISGQLTWTRLPQGFKNSP
TLFNEALHRDLADFRIQHPDLILLQYVDDLLLAATSELDCQQGTRALLQ
TLGNLGYRASAKKAQICQKQVKYLGYLLKEGQRWLTEARKETVMGQPTP
KTPRQLREFLGKAGFCRLFIPGFAEMAAPLYPLTKPGTLFNWGPDQQKA
YQEIKQALLTAPALGLPDLTKPFELFVDEKQGYAKGVLTQKLGPWRRPV
AYLSKKLDPVAAGWPPCLRMVAAIAVLTKDAGKLTMGQPLVILAPHAVE
ALVKQPPDRWLSNARMTHYQALLLDTDRVQFGPVVALNPATLLPLPEEG
LQHNCLDILAEAHGTRPDLTDQPLPDADHTWYTDGSSLLQEGQRKAGAA
VTTETEVIWAKALPAGTSAQRAELIALTQALKMAEGKKLNVYTDSRYAF
ATAHIHGEIYRRRGWLTSEGKEIKNKDEILALLKALFLPKRLSIIHCPG
HQKGHSAEARGNRMADQAARKAAITETPDTSTLLI

[0207] In some embodiments, a Gene Writer polypeptide comprises a flexible linker between the endonuclease and the RT domain, e.g., a linker comprising the amino acid sequence SGGSSGGSSGSETPGTSESATPESSGGSSGGSS (SEQ ID NO: 1601). In some embodiments, an RT domain of a Gene Writer polypeptide may be located C-terminal to the endonuclease domain. In some embodiments, an RT domain of a Gene Writer polypeptide may be located N-terminal to the endonuclease domain.

[0208] In some embodiments, a Gene Writer polypeptide comprises a dCas9 sequence comprising a D10A and/or H840A mutation, e.g., the following sequence:

(SEQ ID NO: 1602)
SMDKKYSIGLAIGTNSVGWAVITDDYKVPSKKFKVLGNTDRHSIKKNLI
GALLFDSGETAEATRLKRTARRRYTRRKNRICYLQEIFSNEMAKVDDSF
FHRLEESFLVEEDKKHERHPIFGNIVDEVAYHEKYPTIYHLRKKLVDST
DKADLRLIYLALAHMIKFRGHFLIEGDLNPDNSDVDKLFIQLVQTYNQL
FEENPINASGVDAKAILSARLSKSRRLENLIAQLPGEKKNGLFGNLIAL
SLGLTPNFKSNFDLAEDAKLQLSKDTYDDDLDNLLAQIGDQYADLFLAA
KNLSDAILLSDILRVNTEITKAPLSASMIKRYDEHHQDLTLLKALVRQQ
LPEKYKEIFFDQSKNGYAGYIDGGASQEEFYKFIKPILEKMDGTEELLV
KLNREDLLRKQRTFDNGSIPHQIHLGELHAILRRQEDFYPFLKDNREKI
EKILTFRIPYYVGPLARGNSRFAWMTRKSEETITPWNFEEVVDKGASAQ
SFIERMTNFDKNLPNEKVLPKHSLLYEYFTVYNELTKVKYVTEGMRKPA
FLSGEQKKAIVDLLFKTNRKVTVKQLKEDYFKKIECFDSVEISGVEDRF
NASLGTYHDLLKIIKDKDFLDNEENEDILEDIVLTLTLFEDREMIEERL
KTYAHLFDDKVMKQLKRRRYTGWGRLSRKLINGIRDKQSGKTILDFLKS
DGFANRNFMQLIHDDSLTFKEDIQKAQVSGQGDSLHEHIANLAGSPAIK
KGILQTVKVVDELVKVMGRHKPENIVIEMARENQTTQKGQKNSRERMKR
IEEGIKELGSQILKEHPVENTQLQNEKLYLYYLQNGRDMYVDQELDINR
LSDYDVDAIVPQSFLKDDSIDNKVLTRSDKNRGKSDNVPSEEVVKKMKN
YWRQLLNAKLITQRKFDNLTKAERGGLSELDKAGFIKRQLVETRQITKH
VAQILDSRMNTKYDENDKLIREVKVITLKSKLVSDFRKDFQFYKVREIN
NYHHAHDAYLNAVVGTALIKKYPKLESEFVYGDYKVYDVRKMIAKSEQE
IGKATAKYFFYSNIMNFFKTEITLANGEIRKRPLIETNGETGEIVWDKG
RDFATVRKVLSMPQVNIVKKTEVQTGGFSKESILPKRNSDKLIARKKDW
DPKKYGGFDSPTVAYSVLVVAKVEKGKSKKLKSVKELLGITIMERSSFE
KNPIDFLEAKGYKEVKKDLIIKLPKYSLFELENGRKRMLASAGELQKGN
ELALPSKYVNFLYLASHYEKLKGSPEDNEQKQLFVEQHKHYLDEIIEQI
SEFSKRVILADANLDKVLSAYNKHRDKPIREQAENIIHLFTLTNLGAPA
AFKYFDTTIDRKRYTSTKEVLDATLIHQSITGLYETRIDLSQLGGD

[0209] In some embodiments, a template RNA molecule for use in the system comprises, from 5′ to 3′ (1) a gRNA spacer; (2) a gRNA scaffold; (3) heterologous object sequence (4) 3′ homology domain. In some embodiments:
[0210] (1) Is a Cas9 spacer of ˜18-22 nt, e.g., is 20 nt
[0211] (2) Is a gRNA scaffold comprising one or more hairpin loops, e.g., 1, 2, of 3 looped for associating the template with a nickase Cas9 domain. In some embodiments, the gRNA scaffold carries the sequence, from 5′ to 3′,

(SEQ ID NO: 1603)
GTTTTAGAGCTAGAAATAGCAAGTTAAAATAAGGCTAGTCCGTTATCAA
CTTGAAAAAGTGGGACCGAGTCGGTCC.

[0212] (3) In some embodiments, the heterologous object sequence is, e.g., 7-74, e.g., 10-20, 20-30, 30-40, 40-50, 50-60, 60-70, or 70-80 nt or, 80-90 nt in length. In some embodiments, the first (most 5′) base of the sequence is not C.
[0213] (4) In some embodiments, the 3′ homology domain that binds the target priming sequence after nicking occurs is e.g., 3-20 nt, e.g., 7-15 nt, e.g., 12-14 nt. In some embodiments, the 3′ homology domain has 40-60% GC content.

[0214] A second gRNA associated with the system may help drive complete integration. In some embodiments, the second gRNA may target a location that is 0-200 nt away from the first-strand nick, e.g., 0-50, 50-100, 100-200 nt away from the first-strand nick. In some embodiments, the second gRNA can only bind its target sequence after the edit is made, e.g., the gRNA binds a sequence present in the heterologous object sequence, but not in the initial target sequence.

[0215] In some embodiments, a Gene Writing system described herein is used to make an edit in HEK293, K562, U2OS, or HeLa cells. In some embodiment, a Gene Writing system is used to make an edit in primary cells, e.g., primary cortical neurons from E18.5 mice.

[0216] In some embodiments, a reverse transcriptase or RT domain (e.g., as described herein) comprises a MoMLV RT sequence or variant thereof. In embodiments, the MoMLV RT sequence comprises one or more mutations selected from D200N, L603W, T330P, T306K, W313F, D524G, E562Q, D583N, P51L, S67R, E67K, T197A, H204R, E302K, F309N, L435G, N454K, H594Q, D653N, R110S, and K103L. In embodiments, the MoMLV RT sequence comprises a combination of mutations, such as D200N, L603W, and T330P, optionally further including T306K and/or W313F.

[0217] In some embodiments, an endonuclease domain (e.g., as described herein) comprises nCAS9, e.g., comprising the H840A mutation.

[0218] In some embodiments, the heterologous object sequence (e.g., of a system as described herein) is about 1-50, 50-100, 100-200, 200-300, 300-400, 400-500, 500-600, 600-700, 700-800, 800-900, 900-1000, or more, nucleotides in length.

[0219] In some embodiments, the RT and endonuclease domains are joined by a flexible linker, e.g., comprising the amino acid sequence SGGSSGGSSGSETPGTSESATPESSGGSSGGSS (SEQ ID NO: 1601).

[0220] In some embodiments, the endonuclease domain is N-terminal relative to the RT domain. In some embodiments, the endonuclease domain is C-terminal relative to the RT domain.

[0221] In some embodiments, the system incorporates a heterologous object sequence into a target site by TPRT, e.g., as described herein.

[0222] In some embodiments, a system or method described herein involves a CRISPR DNA targeting enzyme or system described in US Pat. App. Pub. No. 20200063126, 20190002889, or 20190002875 (each of which is incorporated by reference herein in its entirety) or a functional fragment or variant thereof. For instance, in some embodiments, a GeneWriter polypeptide or Cas endonuclease described herein comprises a polypeptide sequence of any of the applications mentioned in this paragraph, and in some embodiments a template RNA or guide RNA comprises a nucleic acid sequence of any of the applications mentioned in this paragraph.

[0223] The template nucleic acid (e.g., template RNA) component of a Gene Writer genome editing system described herein typically is able to bind the Gene Writer genome editing protein of the system. In some embodiments the template nucleic acid (e.g., template RNA) has a 3′ region that is capable of binding a Gene Writer genome editing protein. The binding region, e.g., 3′ region, may be a structured RNA region, e.g., having at least 1, 2 or 3 hairpin loops, capable of binding the Gene Writer genome editing protein of the system. The binding region may associate the template nucleic acid (e.g., template RNA) with any of the polypeptide modules. In some embodiments, the binding region of the template nucleic acid (e.g., template RNA) may associate with an RNA-binding domain in the polypeptide. In some embodiments, the binding region of the template nucleic acid (e.g., template RNA) may associate with the reverse transcription domain of the polypeptide (e.g., specifically bind to the RT domain). For example, where the reverse transcription domain is derived from a non-LTR retrotransposon, the template nucleic acid (e.g., template RNA) may contain a binding region derived from a non-LTR retrotransposon, e.g., a 3′ UTR from a non-LTR retrotransposon. In some embodiments, the template nucleic acid (e.g., template RNA) may associate with the DNA binding domain of the polypeptide, e.g., a gRNA associating with a Cas9-derived DNA binding domain. In some embodiments, the binding region may also provide DNA target recognition, e.g., a gRNA hybridizing to the target DNA sequence and binding the polypeptide, e.g., a Cas9 domain. In some embodiments, the template nucleic acid (e.g., template RNA) may associate with multiple components of the polypeptide, e.g., DNA binding domain and reverse transcription domain. For example, the template nucleic acid (e.g., template RNA) may comprise a gRNA region that associates with a Cas9-derived DNA binding domain and a 3′ UTR from a non-LTR retrotransposon that associated with a non-LTR retrotransposon-derived reverse transcription domain.

[0224] In some embodiments a system or method described herein comprises a single template nucleic acid (e.g., template RNA). In some embodiments a system or method described herein comprises a plurality of template nucleic acids (e.g., template RNAs). For example, a system described herein comprises a first RNA comprising (e.g., from 5′ to 3′) a sequence that binds the Gene Writer polypeptide (e.g., the DNA-binding domain and/or the endonuclease domain, e.g., a gRNA) and a sequence that binds a target site (e.g., a non-edited strand of a site in a target genome), and a second RNA (e.g., a template RNA) comprising (e.g., from 5′ to 3′) optionally a sequence that binds the Gene Writer polypeptide (e.g., that specifically binds the RT domain), a heterologous object sequence, and a 3′ homology domain. In some embodiments, when the system comprises a plurality of nucleic acids, each nucleic acid comprises a conjugating domain. In some embodiments, a conjugating domain enables association of nucleic acid molecules, e.g., by hybridization of complementary sequences.

[0225] In some embodiments, a template nucleic acid molecule described herein comprises a 5′ homology region and/or a 3′ homology region. In some embodiments, the 5′ homology region comprises a nucleic acid sequence having at least 85%, 90%, 95%, 96%, 97%, 98%, 99%, or 100% sequence identity with a nucleic acid sequence comprised in a target nucleic acid molecule. In embodiments, the nucleic acid sequence in the target nucleic acid molecule is within about 1, 2, 3, 4, 5, 6, 7, 8, 9, 10, 15, 20, 25, 30, 35, 40, 45, 50, 60, 70, 80, 90, or 100 nucleotides of (e.g., 5′ relative to) a target insertion site, e.g., for a heterologous object sequence, e.g., comprised in the template nucleic acid molecule.

[0226] In some embodiments, the 3′ homology region comprises a nucleic acid sequence having at least 85%, 90%, 95%, 96%, 97%, 98%, 99%, or 100% sequence identity with a nucleic acid sequence comprised in a target nucleic acid molecule. In embodiments, the nucleic acid sequence in the target nucleic acid molecule is within about 1, 2, 3, 4, 5, 6, 7, 8, 9, 10, 15, 20, 25, 30, 35, 40, 45, 50, 60, 70, 80, 90, or 100 nucleotides of (e.g., 3′ relative to) a target insertion site, e.g., for a heterologous object sequence, e.g., comprised in the template nucleic acid molecule. In some embodiments, the 5′ homology region is heterologous to the remainder of the template nucleic acid molecule. In some embodiments, the 3′ homology region is heterologous to the remainder of the template nucleic acid molecule.

[0227] In some embodiments, a template nucleic acid (e.g., template RNA) comprises a 3′ target homology domain. In some embodiments, a 3′ target homology domain is disposed 3′ of the heterologous object sequence and is complementary to a sequence adjacent to a site to be modified by a system described herein, or comprises no more than 1, 2, 3, 4, or 5 mismatches to a sequence complementary to the sequence adjacent to a site to be modified by the system/Gene Writer™. In some embodiments, the 3′ homology region binds within 1, 2, 3, 4, 5, 6, 7, 8, 9, or 10 nucleotides of a nick site in the target nucleic acid molecule. In some embodiments, binding of the 3′ homology region to the target nucleic acid molecule permits initiation of target-primed reverse transcription (TPRT), e.g., with the 3′ homology region acting as a primer for TPRT. In some embodiments, the 3′ target homology domain anneals to the target site, which provides a binding site and the 3′ hydroxyl for the initiation of TPRT by a Gene Writer polypeptide. In some embodiments, the 3′ target homology domain is 3-5, 5-10, 10-30, 10-25, 10-20, 10-19, 10-18, 10-17, 10-16, 10-15, 10-14, 10-13, 10-12, 10-11, 11-30, 11-25, 11-20, 11-19, 11-18, 11-17, 11-16, 11-15, 11-14, 11-13, 11-12, 12-30, 12-25, 12-20, 12-19, 12-18, 12-17, 12-16, 12-15, 12-14, 12-13, 13-30, 13-25, 13-20, 13-19, 13-18, 13-17, 13-16, 13-15, 13-14, 14-30, 14-25, 14-20, 14-19, 14-18, 14-17, 14-16, 14-15, 15-30, 15-25, 15-20, 15-19, 15-18, 15-17, 15-16, 16-30, 16-25, 16-20, 16-19, 16-18, 16-17, 17-30, 17-25, 17-20, 17-19, 17-18, 18-30, 18-25, 18-20, 18-19, 19-30, 19-25, 19-20, 20-30, 20-25, or 25-30 nt in length, e.g., 10-17, 12-16, or 12-14 nt in length.

[0228] In some embodiments, the template nucleic acid, e.g., template RNA, may comprise a gRNA (e.g., pegRNA). In some embodiments, the template nucleic acid, e.g., template RNA, may bind to the Gene Writer™ polypeptide by interaction of a gRNA portion of the template nucleic acid with a template nucleic acid binding domain, e.g., a RNA binding domain (e.g., a heterologous RNA binding domain). In some embodiments, the heterologous RNA binding domain is a CRISPR/Cas protein, e.g., Cas9.

[0229] In some embodiments, the region of the template nucleic acid, e.g., template RNA, comprising the gRNA adopts an underwound ribbon-like structure of gRNA bound to target DNA (e.g., as described in Mulepati et al. Science 19 Sep. 2014:Vol. 345, Issue 6203, pp. 1479-1484). Without wishing to be bound by theory, this non-canonical structure is thought to be facilitated by rotation of every sixth nucleotide out of the RNA-DNA hybrid. Thus, in some embodiments, the region of the template nucleic acid, e.g., template RNA, comprising the gRNA may tolerate increased mismatching with the target site at some interval, e.g., every sixth base. In some embodiments, the region of the template nucleic acid, e.g., template RNA, comprising the gRNA comprising homology to the target site may possess wobble positions at a regular interval, e.g., every sixth base, that do not need to base pair with the target site.

[0230] gRNAs with Inducible Activity

[0231] In some embodiments, a template nucleic acid, e.g., template RNA, comprises a guide RNA (gRNA) with inducible activity. Inducible activity may be achieved by the template nucleic acid, e.g., template RNA, further comprising (in addition to the gRNA) a blocking domain, wherein the sequence of a portion of or all of the blocking domain is at least partially complementary to a portion or all of the gRNA. The blocking domain is thus capable of hybridizing or substantially hybridizing to a portion of or all of the gRNA. In some embodiments, the blocking domain and inducibly active gRNA are disposed on the template nucleic acid, e.g., template RNA, such that the gRNA can adopt a first conformation where the blocking domain is hybridized or substantially hybridized to the gRNA, and a second conformation where the blocking domain is not hybridized or or not substantially hybridized to the gRNA. In some embodiments, in the first conformation the gRNA is unable to bind to the Gene Writer polypeptide (e.g., the template nucleic acid binding domain, DNA binding domain, or endonuclease domain (e.g., a CRISPR/Cas protein)) or binds with substantially decreased affinity compared to an otherwise similar template RNA lacking the blocking domain. In some embodiments, in the second conformation the gRNA is able to bind to the Gene Writer polypeptide (e.g., the template nucleic acid binding domain, DNA binding domain, or endonuclease domain (e.g., a CRISPR/Cas protein)). In some embodiments, whether the gRNA is in the first or second conformation can influence whether the DNA binding or endonuclease activities of the Gene Writer polypeptide (e.g., of the CRISPR/Cas protein the Gene Writer polypeptide comprises) are active. In some embodiments, hybridization of the gRNA to the blocking domain can be disrupted using an opener molecule. In some embodiments, an opener molecule comprises an agent that binds to a portion or all of the gRNA or blocking domain and inhibits hybridization of the gRNA to the blocking domain. In some embodiments, the opener molecule comprises a nucleic acid, e.g., comprising a sequence that is partially or wholly complementary to the gRNA, blocking domain, or both. By choosing or designing an appropriate opener molecule, providing the opener molecule can promote a change in the conformation of the gRNA such that it can associate with a CRISPR/Cas protein and provide the associated functions of the CRISPR/Cas protein (e.g., DNA binding and/or endonuclease activity). Without wishing to be bound by theory, providing the opener molecule at a selected time and/or location may allow for spatial and temporal control of the activity of the gRNA, CRISPR/Cas protein, or Gene Writer system comprising the same. In some embodiments, the opener molecule is exogenous to the cell comprising the Gene Writer polypeptide and or template nucleic acid. In some embodiments, the opener molecule comprises an endogenous agent (e.g., endogenous to the cell comprising the Gene Writer polypeptide and or template nucleic acid comprising the gRNA and blocking domain). For example, an inducible gRNA, blocking domain, and opener molecule may be chosen such that the opener molecule is an endogenous agent expressed in a target cell or tissue, e.g., thereby ensuring activity of a Gene Writer system in the target cell or tissue. As a further example, an inducible gRNA, blocking domain, and opener molecule may be chosen such that the opener molecule is absent or not substantially expressed in one or more non-target cells or tissues, e.g., thereby ensuring that activity of a Gene Writer system does not occur or substantially occur in the one or more non-target cells or tissues, or occurs at a reduced level compared to a target cell or tissue. Exemplary blocking domains, opener molecules, and uses thereof are described in PCT App. Publication WO2020044039A1, which is incorporated herein by reference in its entirety. In some embodiments, the template nucleic acid, e.g., template RNA, may comprise one or more UTRs (e.g. from an R2-type retrotransposon) and a gRNA. In some embodiments, the UTR facilitates interaction of the template nucleic acid (e.g., template RNA) with the writing domain, e.g., reverse transcriptase domain, of the Gene Writer polypeptide. In some embodiments, the gRNA facilitates interaction with the template nucleic acid binding domain (e.g., RNA binding domain) of the polypeptide. In some embodiments, the gRNA directs the polypeptide to the matching target sequence, e.g., in a target cell genome. In some embodiments, the template nucleic acid may contain only the reverse transcriptase binding motif (e.g. 3′ UTR from R2) and the gRNA may be provided as a second nucleic acid molecule (e.g., second RNA molecule) for target site recognition. In some embodiments, the template nucleic acid containing the RT-binding motif may exist on the same molecule as the gRNA, but be processed into two RNA molecules by cleavage activity (e.g. ribozyme).

[0232] In some embodiments, a template RNA may be customized to correct a given mutation in the genomic DNA of a target cell (e.g., ex vivo or in vivo, e.g., in a target tissue or organ, e.g., in a subject). For example, the mutation may be a disease-associated mutation relative to the wild-type sequence. Without wishing to be bound by theory, sets of empirical parameters help ensure optimal initial in silico designs of template RNAs or portions thereof). As a non-limiting illustrative example, for a selected mutation, the following design parameters may be employed. In some embodiments, design is initiated by acquiring approximately 500 bp (e.g., up to 50, 100, 150, 200, 250, 300, 350, 400, 450, 500, 550, 600, 650, or 700 bp, and optionally at least 20, 30, 40, 50, 100, 150, 200, 250, 300, 350, 400, 450, 500, 550, 600, or 650 bp) flanking sequence on either side of the mutation to serve as the target region. In some embodiments, a template nucleic acid comprises a gRNA. Methodology for designing gRNAs is known to those of skill in the art. In some embodiments, a gRNA comprises a sequence (e.g., a CRISPR spacer) that binds a target site. In some embodiments, the sequence (e.g., a CRISPR spacer) that binds a target site for use in targeting a template nucleic acid to a target region is selected by considering the particular Gene Writer polypeptide (e.g., endonuclease domain or writing domain, e.g., comprising a CRISPR/Cas domain) being used (e.g., for Cas9, a protospacer-adjacent motif (PAM) of NGG immediately 3′ of a 20 nt gRNA binding region). In some embodiments, the CRISPR spacer is selected by ranking first by whether the PAM will be disrupted by the Gene Writing induced edit. In some embodiments, disruption of the PAM may increase edit efficiency. In some embodiments, the PAM can be disrupted by also introducing (e.g., as part of or in addition to another modification to a target site in genomic DNA) a silent mutation (e.g., a mutation that does not alter an amino acid residue encoded by the target nucleic acid sequence, if any) in the target site during Gene Writing. In some embodiments, the CRISPR spacer is selected by ranking sequences by the proximity of their corresponding genomic site to the desired edit location. In some embodiments, the gRNA comprises a gRNA scaffold. In some embodiments, the gRNA scaffold used may be a standard scaffold (e.g., for Cas9, 5′-GTTTTAGAGCTAGAAATAGCAAGTTAAAATAAGGCTAGTCCGTTATCAACTTGAAAA AGTGGGACCGAGTCGGTCC-3′(SEQ ID NO: 1603)), or may contain one or more nucleotide substitutions. In some embodiments, the heterologous object sequence has at least 90% identity, e.g., at least 90%, 95%, 98%, 99%, or 100% identity, or comprises no more than 1, 2, 3, 4, or 5 positions of non-identity to the target site 3′ of the first strand nick (e.g., immediately 3′ of the first strand nick or up to 1, 2, 3, 4, or 5 nucleotides 3′ of the first strand nick), with the exception of any insertion, substitution, or deletion that may be written into the target site by the Gene Writer. In some embodiments, the 3′ target homology domain contains at least 90% identity, e.g., at least 90%, 95%, 98%, 99%, or 100% identity, or comprises no more than 1, 2, 3, 4, or 5 positions of non-identity to the target site 5′ of the first strand nick (e.g., immediately 5′ of the first strand nick or up to 1, 2, 3, 4, or 5 nucleotides 3′ of the first strand nick).

[0233] In some embodiments, the template possesses one or more sequences aiding in association of the template with the Gene Writer polypeptide. In some embodiments, these sequences may be derived from retrotransposon UTRs. In some embodiments, the UTRs may be located flanking the desired insertion sequence. In some embodiments, a sequence with target site homology may be located outside of one or both UTRs. In some embodiments, the sequence with target site homology can anneal to the target sequence to prime reverse transcription. In some embodiments, the 5′ and/or 3′ UTR may be located terminal to the target site homology sequence, e.g., such that target primed reverse transcription excludes reverse transcription of the 5′ and/or 3′ UTR. In some embodiments, the Gene Writer system may result in the insertion of a desired payload without any additional sequence (e.g. gene expression unit without UTRs used to bind the Gene Writer protein).

[0234] The template nucleic acid (e.g., template RNA) can be designed to result in insertions, mutations, or deletions at the target DNA locus. In some embodiments, the template nucleic acid (e.g., template RNA) may be designed to cause an insertion in the target DNA. For example, the template nucleic acid (e.g., template RNA) may contain a heterologous sequence, wherein the reverse transcription will result in insertion of the heterologous sequence into the target DNA. In other embodiments, the RNA template may be designed to write a deletion into the target DNA. For example, the template nucleic acid (e.g., template RNA) may match the target DNA upstream and downstream of the desired deletion, wherein the reverse transcription will result in the copying of the upstream and downstream sequences from the template nucleic acid (e.g., template RNA) without the intervening sequence, e.g., causing deletion of the intervening sequence. In other embodiments, the template nucleic acid (e.g., template RNA) may be designed to write an edit into the target DNA. For example, the template RNA may match the target DNA sequence with the exception of one or more nucleotides, wherein the reverse transcription will result in the copying of these edits into the target DNA, e.g., resulting in mutations, e.g., transition or transversion mutations.

[0235] In some embodiments, a Gene Writer system is capable of producing an insertion into the target site of at least 45, 50, 55, 60, 65, 70, 75, 80, 85, 90, 95, or 100 nucleotides (and optionally no more than 500, 400, 300, 200, or 100 nucleotides). In some embodiments, a Gene Writer system is capable of producing an insertion into the target site of at least 1, 2, 3, 4, 5, 6, 7, 8, 9, 10, 15, 20, 25, 30, 35, 40, 45, 50, 55, 60, 65, 70, 75, 80, 85, 90, 95, or 100 nucleotides (and optionally no more than 500, 400, 300, 200, or 100 nucleotides). In some embodiments, a Gene Writer system is capable of producing an insertion into the target site of at least 0.2, 0.3, 0.4, 0.5, 0.6, 0.7, 0.8, 0.9, 1, 1.5, 2, 2.5, 3, 3.5, 4, 4.5, 5, 5.5, 6, 6.5, 7, 7.5, 8, 8.5, 9, 9.5 or 10 kilobases (and optionally no more than 1, 5, 10, or 20 kilobases). In some embodiments, a Gene Writer system is capable of producing a deletion of at least 81, 85, 90, 95, 100, 110, 120, 130, 140, 150, 160, 170, 180, 190, or 200 nucleotides (and optionally no more than 500, 400, 300, or 200 nucleotides). In some embodiments, a Gene Writer system is capable of producing a deletion of at least 81, 85, 90, 95, 100, 110, 120, 130, 140, 150, 160, 170, 180, 190, or 200 nucleotides (and optionally no more than 500, 400, 300, or 200 nucleotides). In some embodiments, a Gene Writer system is capable of producing a deletion of at least 1, 2, 3, 4, 5, 6, 7, 8, 9, 10, 15, 20, 25, 30, 35, 40, 45, 50, 55, 60, 65, 70, 75, 80, 85, 90, 95, 100, 110, 120, 130, 140, 150, 160, 170, 180, 190, or 200 nucleotides (and optionally no more than 500, 400, 300, or 200 nucleotides). In some embodiments, a Gene Writer system is capable of producing a deletion of at least 0.2, 0.3, 0.4, 0.5, 0.6, 0.7, 0.8, 0.9, 1, 1.5, 2, 2.5, 3, 3.5, 4, 4.5, 5, 5.5, 6, 6.5, 7, 7.5, 8, 8.5, 9, 9.5 or 10 kilobases (and optionally no more than 1, 5, 10, or 20 kilobases). In some embodiments, a Gene Writer system is capable of producing a substitution into the target site of at least 1, 2, 3, 4, 5, 6, 7, 8, 9, 10, 15, 20, 25, 30, 35, 40, 45, 50, 60, 70, 80, 90, or 100 or more nucleotides. In some embodiments, the substitution is a transition mutation. In some embodiments, the substitution is a transversion mutation. In some embodiments, the substitution converts an adenine to a thymine, an adenine to a guanine, an adenine to a cytosine, a guanine to a thymine, a guanine to a cytosine, a guanine to an adenine, a thymine to a cytosine, a thymine to an adenine, a thymine to a guanine, a cytosine to an adenine, a cytosine to a guanine, or a cytosine to a thymine.

[0236] Methods and Compositions for Modified RNA (e.g., gRNA or Template RNA)

[0237] In some embodiments, an RNA component of the system (e.g., a template RNA or a gRNA, e.g., as described herein) comprises one or more nucleotide modifications. In some embodiments, the modification pattern of a gRNA can significantly affect in vivo activity compared to unmodified or end-modified guides (e.g., as shown in FIG. 1D from Finn et al. Cell Rep 22(9):2227-2235 (2018); incorporated herein by reference in its entirety). Without wishing to be bound by theory, this process may be due, at least in part, to a stabilization of the RNA conferred by the modifications. Non-limiting examples of such modifications may include 2′-O-methyl (2′-O-Me), 2′-O-(2-methoxyethyl) (2′-O-MOE), 2′-fluoro (2′-F), phosphorothioate (PS) bond between nucleotides, G-C substitutions, and inverted abasic linkages between nucleotides and equivalents thereof.

[0238] In some embodiments, the template RNA (e.g., at the portion thereof that binds a target site) or the guide RNA comprises a 5′ terminus region. In some embodiments, the template RNA or the guide RNA does not comprise a 5′ terminus region. In some embodiments, the 5′ terminus region comprises a CRISPR spacer region, e.g., as described with respect to sgRNA in Briner AE et al, Molecular Cell 56: 333-339 (2014) (incorporated herein by reference in its entirety; applicable herein, e.g., to all guide RNAs). In some embodiments, the 5′ terminus region comprises a 5′ end modification. In some embodiments, a 5′ terminus region with or without a spacer region may be associated with a crRNA, trRNA, sgRNA and/or dgRNA. The CRISPR spacer region can, in some instances, comprise a guide region, guide domain, or targeting domain. In some embodiments, a target domain or target sequence may comprise a sequence of nucleic acid to which the guide region/domain directs a nuclease for cleavage. In some embodiments, a spyCas9 protein may be directed by a guide region/domain to a target sequence of a target nucleic acid molecule by the nucleotides present in the CRISPR spacer region.

[0239] In some embodiments, the template RNA (e.g., at the portion thereof that binds a target site) or guide RNA, e.g., as described herein, comprises any of the sequences shown in Table 4 of WO2018107028A1, incorporated herein by reference in its entirety. In some embodiments, where a sequence shows a guide and/or spacer region, the composition may comprise this region or not. In some embodiments, a guide RNA comprises one or more of the modifications of any of the sequences shown in Table 4 of WO2018107028A1, e.g., as identified therein by a SEQ ID NO. In embodiments, the nucleotides may be the same or different, and/or the modification pattern shown may be the same or similar to a modification pattern of a guide sequence as shown in Table 4 of WO2018107028A1. In some embodiments, a modification pattern includes the relative position and identity of modifications of the gRNA or a region of the gRNA (e.g. 5′ terminus region, lower stem region, bulge region, upper stem region, nexus region, hairpin 1 region, hairpin 2 region, 3′ terminus region). In some embodiments, the modification pattern contains at least 50%, 55%, 60%, 70%, 75%, 80%, 85%, 90%, 95%, 96%, 97%, 98%, 99%, or 100% of the modifications of any one of the sequences shown in the sequence column of Table 4 of WO2018107028A1, and/or over one or more regions of the sequence. In some embodiments, the modification pattern is at least 50%, 55%, 60%, 70%, 75%, 80%, 85%, 90%, 95%, 96%, 97%, 98%, 99%, or 100% identical to the modification pattern of any one of the sequences shown in the sequence column of Table 4 of WO2018107028A1. In some embodiments, the modification pattern is at least 50%, 55%, 60%, 70%, 75%, 80%, 85%, 90%, 95%, 96%, 97%, 98%, 99%, or 100% identical over one or more regions of the sequence shown in Table 4 of WO2018107028A1, e.g., in a 5′terminus region, lower stem region, bulge region, upper stem region, nexus region, hairpin 1 region, hairpin 2 region, and/or 3′ terminus region. In some embodiments, the modification pattern is least 50%, 55%, 60%, 70%, 75%, 80%, 85%, 90%, 95%, 96%, 97%, 98%, 99%, or 100% identical to the modification pattern of a sequence over the 5′ terminus region. In some embodiments, the modification pattern is least 50%, 55%, 60%, 70%, 75%, 80%, 85%, 90%, 95%, 96%, 97%, 98%, 99%, or 100% identical over the lower stem. In some embodiments, the modification pattern is least 50%, 55%, 60%, 70%, 75%, 80%, 85%, 90%, 95%, 96%, 97%, 98%, 99%, or 100% identical over the bulge. In some embodiments, the modification pattern is least 50%, 55%, 60%, 70%, 75%, 80%, 85%, 90%, 95%, 96%, 97%, 98%, 99%, or 100% identical over the upper stem. In some embodiments, the modification pattern is least 50%, 55%, 60%, 70%, 75%, 80%, 85%, 90%, 95%, 96%, 97%, 98%, 99%, or 100% identical over the nexus. In some embodiments, the modification pattern is least 50%, 55%, 60%, 70%, 75%, 80%, 85%, 90%, 95%, 96%, 97%, 98%, 99%, or 100% identical over the hairpin 1. In some embodiments, the modification pattern is least 50%, 55%, 60%, 70%, 75%, 80%, 85%, 90%, 95%, 96%, 97%, 98%, 99%, or 100% identical over the hairpin 2. In some embodiments, the modification pattern is least 50%, 55%, 60%, 70%, 75%, 80%, 85%, 90%, 95%, 96%, 97%, 98%, 99%, or 100% identical over the 3′ terminus. In some embodiments, the modification pattern differs from the modification pattern of a sequence of Table 4 of WO2018107028A1, or a region (e.g. 5′ terminus, lower stem, bulge, upper stem, nexus, hairpin 1, hairpin 2, 3′ terminus) of such a sequence, e.g., at 0, 1, 2, 3, 4, 5, 6, or more nucleotides. In some embodiments, the gRNA comprises modifications that differ from the modifications of a sequence of Table 4 of WO2018107028A1, e.g., at 0, 1, 2, 3, 4, 5, 6, or more nucleotides. In some embodiments, the gRNA comprises modifications that differ from modifications of a region (e.g. 5′terminus, lower stem, bulge, upper stem, nexus, hairpin 1, hairpin 2, 3′ terminus) of a sequence of Table 4 of WO2018107028A1, e.g., at 0, 1, 2, 3, 4, 5, 6, or more nucleotides.

[0240] In some embodiments, the template RNA (e.g., at the portion thereof that binds a target site) or the gRNA comprises a 2′-O-methyl (2′-O-Me) modified nucleotide. In some embodiments, the gRNA comprises a 2′-O-(2-methoxy ethyl) (2′-O-moe) modified nucleotide. In some embodiments, the gRNA comprises a 2′-fluoro (2′-F) modified nucleotide. In some embodiments, the gRNA comprises a phosphorothioate (PS) bond between nucleotides. In some embodiments, the gRNA comprises a 5′ end modification, a 3′ end modification, or 5′ and 3′ end modifications. In some embodiments, the 5′ end modification comprises a phosphorothioate (PS) bond between nucleotides. In some embodiments, the 5′ end modification comprises a 2′-O-methyl (2′-O-Me), 2′-O-(2-methoxy ethyl) (2′-O-MOE), and/or 2′-fluoro (2′-F) modified nucleotide. In some embodiments, the 5′ end modification comprises at least one phosphorothioate (PS) bond and one or more of a 2′-O-methyl (2′-O-Me), 2′-O-(2-methoxyethyl) (2′-O-MOE), and/or 2′-fluoro (2′-F) modified nucleotide. The end modification may comprise a phosphorothioate (PS), 2′-O-methyl (2′-O-Me), 2′-O-(2-methoxyethyl) (2′-O-MOE), and/or 2′-fluoro (2′-F) modification. Equivalent end modifications are also encompassed by embodiments described herein. In some embodiments, the template RNA or gRNA comprises an end modification in combination with a modification of one or more regions of the template RNA or gRNA. Additional exemplary modifications and methods for protecting RNA, e.g., gRNA, and formulae thereof, are described in WO2018126176A1, which is incorporated herein by reference in its entirety.

[0241] In some embodiments, structure-guided and systematic approaches are used to introduce modifications (e.g., 2′-OMe-RNA, 2′-F-RNA, and PS modifications) to a template RNA or guide RNA, for example, as described in Mir et al. Nat Commun 9:2641 (2018) (incorporated by reference herein in its entirety). In some embodiments, the incorporation of 2′-F-RNAs increases thermal and nuclease stability of RNA:RNA or RNA:DNA duplexes, e.g., while minimally interfering with C3′-endo sugar puckering. In some embodiments, 2′-F may be better tolerated than 2′-OMe at positions where the 2′-OH is important for RNA:DNA duplex stability. In some embodiments, a crRNA comprises one or more modifications that do not reduce Cas9 activity, e.g., C10, C20, or C21 (fully modified), e.g., as described in Supplementary Table 1 of Mir et al. Nat Commun 9:2641 (2018), incorporated herein by reference in its entirety. In some embodiments, a tracrRNA comprises one or more modifications that do not reduce Cas9 activity, e.g., T2, T6, T7, or T8 (fully modified) of Supplementary Table 1 of Mir et al. Nat Commun 9:2641 (2018). In some embodiments, a crRNA comprises one or more modifications (e.g., as described herein) may be paired with a tracrRNA comprising one or more modifications, e.g., C20 and T2. In some embodiments, a gRNA comprises a chimera, e.g., of a crRNA and a tracrRNA (e.g., Jinek et al. Science 337(6096):816-821 (2012)). In embodiments, modifications from the crRNA and tracrRNA are mapped onto the single-guide chimera, e.g., to produce a modified gRNA with enhanced stability.

[0242] In some embodiments, gRNA molecules may be modified by the addition or subtraction of the naturally occurring structural components, e.g., hairpins. In some embodiments, a gRNA may comprise a gRNA with one or more 3′ hairpin elements deleted, e.g., as described in WO2018106727, incorporated herein by reference in its entirety. In some embodiments, a gRNA may contain an added hairpin structure, e.g., an added hairpin structure in the spacer region, which was shown to increase specificity of a CRISPR-Cas system in the teachings of Kocak et al. Nat Biotechnol 37(6):657-666 (2019). Additional modifications, including examples of shortened gRNA and specific modifications improving in vivo activity, can be found in US20190316121, incorporated herein by reference in its entirety.

[0243] In some embodiments, structure-guided and systematic approaches (e.g., as described in Mir et al. Nat Commun 9:2641 (2018); incorporated herein by reference in its entirety) are employed to find modifications for the template RNA. In embodiments, the modifications are identified with the inclusion or exclusion of a guide region of the template RNA. In some embodiments, a structure of polypeptide bound to template RNA is used to determine non-protein-contacted nucleotides of the RNA that may then be selected for modifications, e.g., with lower risk of disrupting the association of the RNA with the polypeptide. Secondary structures in a template RNA can also be predicted in silico by software tools, e.g., the RNAstructure tool available at rna.urmc.rochester.edu/RNAstructureWeb (Bellaousov et al. Nucleic Acids Res 41:W471-W474 (2013); incorporated by reference herein in its entirety), e.g., to determine secondary structures for selecting modifications, e.g., hairpins, stems, and/or bulges.

[0244] Further included here are compositions and methods for the assembly of full or partial template RNA molecules (e.g., Gene Writing template RNA molecules optionally comprising a gRNA, or separate gRNA molecules). In some embodiments, RNA molecules may be assembled by the connection of two or more (e.g., two, three, four, five, six, seven, eight, nine, ten, or more) RNA segments with each other. In an aspect, the disclosure provides methods for producing nucleic acid molecules, the methods comprising contacting two or more linear RNA segments with each other under conditions that allow for the 5′ terminus of a first RNA segment to be covalently linked with the 3′ terminus of a second RNA segment. In some embodiments, the joined molecule may be contacted with a third RNA segment under conditions that allow for the 5′ terminus of the joined molecule to be covalently linked with the 3′ terminus of the third RNA segment. In embodiments, the method further comprises joining a fourth, fifth, or additional RNA segments to the elongated molecule. This form of assembly may, in some instances, allow for rapid and efficient assembly of RNA molecules.

[0245] The present disclosure also provides compositions and methods for the connection (e.g., covalent connection) of crRNA molecules and tracrRNA molecules. In some embodiments, guide RNA molecules with specificity for different target sites can be generated using a single tracrRNA molecule/segment connected to a target site specific crRNA molecule/segment (e.g., as shown in FIG. 10 of US20160102322A1; incorporated herein by reference in its entirety). For example, FIG. 10 of US20160102322A1 shows four tubes with different crRNA molecules with crRNA molecule 3 being connected to a tracrRNA molecule to form a guide RNA molecule, thereby depicting an exemplary connection of two RNA segments to form a product RNA molecule.

[0246] The disclosure also provides compositions and methods for the production of template RNA molecules with specificity for a Gene Writer polypeptide and/or a genomic target site. In an aspect, the method comprises: (1) identification of the target site and desired modification thereto, (2) production of RNA segments including an upstream homology segment, a heterologous object sequence segment, a Gene Writer polypeptide binding motif, and a gRNA segment, and/or (3) connection of the four or more segments into at least one molecule, e.g., into a single RNA molecule. In some embodiments, some or all of the template RNA segments comprised in (2) are assembled into a template RNA molecule, e.g., one, two, three, or four of the listed components. In some embodiments, the segments comprised in (2) may be produced in further segmented molecules, e.g., split into at least 2, at least 3, at least 4, or at least 5 or more sub-segments, e.g., that are subsequently assembled, e.g., by one or more methods described herein.

[0247] In some embodiments, RNA segments may be produced by chemical synthesis. In some embodiments, RNA segments may be produced by in vitro transcription of a nucleic acid template, e.g., by providing an RNA polymerase to act on a cognate promoter of a DNA template to produce an RNA transcript. In some embodiments, in vitro transcription is performed using, e.g., a T7, T3, or SP6 RNA polymerase, or a derivative thereof, acting on a DNA, e.g., dsDNA, ssDNA, linear DNA, plasmid DNA, linear DNA amplicon, linearized plasmid DNA, e.g., encoding the RNA segment, e.g., under transcriptional control of a cognate promoter, e.g., a T7, T3, or SP6 promoter. In some embodiments, a combination of chemical synthesis and in vitro transcription is used to generate the RNA segments for assembly. In embodiments, the gRNA, upstream target homology, and Gene Writer polypeptide binding segments are produced by chemical synthesis and the heterologous object sequence segment is produced by in vitro transcription. Without wishing to be bound by theory, in vitro transcription may be better suited for the production of longer RNA molecules. In some embodiments, reaction temperature for in vitro transcription may be lowered, e.g., be less than 37° C. (e.g., between 0-10 C, 10-20 C, or 20-30 C), to result in a higher proportion of full-length transcripts (Krieg Nucleic Acids Res 18:6463 (1990)). In some embodiments, a protocol for improved synthesis of long transcripts is employed to synthesize a long template RNA, e.g., a template RNA greater than 5 kb, such as the use of e.g., T7 RiboMAX Express, which can generate 27 kb transcripts in vitro (Thiel et al. J Gen Virol 82(6):1273-1281 (2001)). In some embodiments, modifications to RNA molecules as described herein may be incorporated during synthesis of RNA segments (e.g., through the inclusion of modified nucleotides or alternative binding chemistries), following synthesis of RNA segments through chemical or enzymatic processes, following assembly of one or more RNA segments, or a combination thereof.

[0248] In some embodiments, an mRNA of the system (e.g., an mRNA encoding a Gene Writer polypeptide) is synthesized in vitro using T7 polymerase-mediated DNA-dependent RNA transcription from a linearized DNA template, where UTP is optionally substituted with 1-methylpseudoUTP. In some embodiments, the transcript incorporates 5′ and 3′ UTRs, e.g., GGGAAAUAAGAGAGAAAAGAAGAGUAAGAAGAAAUAUAAGAGCCACC (SEQ ID NO: 1604) and UGAUAAUAGGCUGGAGCCUCGGUGGCCAUGCUUCUUGCCCCUUGGGCCUCCCCCC AGCCCCUCCUCCCCUUCCUGCACCCGUACCCCCGUGGUCUUUGAAUAAAGUCUGA (SEQ ID NO: 1605), or functional fragments or variants thereof, and optionally includes a poly-A tail, which can be encoded in the DNA template or added enzymatically following transcription. In some embodiments, a donor methyl group, e.g., S-adenosylmethionine, is added to a methylated capped RNA with cap 0 structure to yield a cap 1 structure that increases mRNA translation efficiency (Richner et al. Cell 168(6): P1114-1125 (2017)).

[0249] In some embodiments, the transcript from a T7 promoter starts with a GGG motif. In some embodiments, a transcript from a T7 promoter does not start with a GGG motif. It has been shown that a GGG motif at the transcriptional start, despite providing superior yield, may lead to T7 RNAP synthesizing a ladder of poly(G) products as a result of slippage of the transcript on the three C residues in the template strand from +1 to +3 (Imburgio et al. Biochemistry 39(34):10419-10430 (2000). For tuning transcription levels and altering the transcription start site nucleotides to fit alternative 5′ UTRs, the teachings of Davidson et al. Pac Symp Biocomput 433-443 (2010) describe T7 promoter variants, and the methods of discovery thereof, that fulfill both of these traits.

[0250] In some embodiments, RNA segments may be connected to each other by covalent coupling. In some embodiments, an RNA ligase, e.g., T4 RNA ligase, may be used to connect two or more RNA segments to each other. When a reagent such as an RNA ligase is used, a 5′ terminus is typically linked to a 3′ terminus. In some embodiments, if two segments are connected, then there are two possible linear constructs that can be formed (i.e., (1) 5′-Segment 1-Segment 2-3′ and (2) 5′-Segment 2-Segment 1-3′). In some embodiments, intramolecular circularization can also occur. Both of these issues can be addressed, for example, by blocking one 5′ terminus or one 3′ terminus so that RNA ligase cannot ligate the terminus to another terminus. In embodiments, if a construct of 5′-Segment 1-Segment 2-3′ is desired, then placing a blocking group on either the 5′ end of Segment 1 or the 3′ end of Segment 2 may result in the formation of only the correct linear ligation product and/or prevent intramolecular circularization. Compositions and methods for the covalent connection of two nucleic acid (e.g., RNA) segments are disclosed, for example, in US20160102322A1 (incorporated herein by reference in its entirety), along with methods including the use of an RNA ligase to directionally ligate two single-stranded RNA segments to each other.

[0251] One example of an end blocker that may be used in conjunction with, for example, T4 RNA ligase, is a dideoxy terminator. T4 RNA ligase typically catalyzes the ATP-dependent ligation of phosphodiester bonds between 5′-phosphate and 3′-hydroxyl termini. In some embodiments, when T4 RNA ligase is used, suitable termini must be present on the termini being ligated. One means for blocking T4 RNA ligase on a terminus comprises failing to have the correct terminus format. Generally, termini of RNA segments with a 5-hydroxyl or a 3′-phosphate will not act as substrates for T4 RNA ligase.

[0252] Additional exemplary methods that may be used to connect RNA segments is by click chemistry (e.g., as described in U.S. Pat. Nos. 7,375,234 and 7,070,941, and US Patent Publication No. 2013/0046084, the entire disclosures of which are incorporated herein by reference). For example, one exemplary click chemistry reaction is between an alkyne group and an azide group (see FIG. 11 of US20160102322A1, which is incorporated herein by reference in its entirety). Any click reaction may potentially be used to link RNA segments (e.g., Cu-azide-alkyne, strain-promoted-azide-alkyne, staudinger ligation, tetrazine ligation, photo-induced tetrazole-alkene, thiol-ene, NHS esters, epoxides, isocyanates, and aldehyde-aminooxy). In some embodiments, ligation of RNA molecules using a click chemistry reaction is advantageous because click chemistry reactions are fast, modular, efficient, often do not produce toxic waste products, can be done with water as a solvent, and/or can be set up to be stereospecific.

[0253] In some embodiments, RNA segments may be connected using an Azide-Alkyne Huisgen Cycloaddition. reaction, which is typically a 1,3-dipolar cycloaddition between an azide and a terminal or internal alkyne to give a 1,2,3-triazole for the ligation of RNA segments. Without wishing to be bound by theory, one advantage of this ligation method may be that this reaction can initiated by the addition of required Cu(I) ions. Other exemplary mechanisms by which RNA segments may be connected include, without limitatoin, the use of halogens (F—, Br—, I—)/alkynes addition reactions, carbonyls/sulfhydryls/maleimide, and carboxyl/amine linkages. For example, one RNA molecule may be modified with thiol at 3′ (using disulfide amidite and universal support or disulfide modified support), and the other RNA molecule may be modified with acrydite at 5′ (using acrylic phosphoramidite), then the two RNA molecules can be connected by a Michael addition reaction. This strategy can also be applied to connecting multiple RNA molecules stepwise. Also provided are methods for linking more than two (e.g., three, four, five, six, etc.) RNA molecules to each other. Without wishing to be bound by theory, this may be useful when a desired RNA molecule is longer than about 40 nucleotides, e.g., such that chemical synthesis efficiency degrades, e.g., as noted in US20160102322A1 (incorporated herein by reference in its entirety).

[0254] By way of illustration, a tracrRNA is typically around 80 nucleotides in length. Such RNA molecules may be produced, for example, by processes such as in vitro transcription or chemical synthesis. In some embodiments, when chemical synthesis is used to produce such RNA molecules, they may be produced as a single synthesis product or by linking two or more synthesized RNA segments to each other. In embodiments, when three or more RNA segments are connected to each other, different methods may be used to link the individual segments together. Also, the RNA segments may be connected to each other in one pot (e.g., a container, vessel, well, tube, plate, or other receptacle), all at the same time, or in one pot at different times or in different pots at different times. In a non-limiting example, to assemble RNA Segments 1, 2 and 3 in numerical order, RNA Segments 1 and 2 may first be connected, 5′ to 3′, to each other. The reaction product may then be purified for reaction mixture components (e.g., by chromatography), then placed in a second pot, for connection of the 3′ terminus with the 5′ terminus of RNA Segment 3. The final reaction product may then be connected to the 5′ terminus of RNA Segment 3.

[0255] In another non-limiting example, RNA Segment 1 (about 30 nucleotides) is the target locus recognition sequence of a crRNA and a portion of Hairpin Region 1. RNA Segment 2 (about 35 nucleotides) contains the remainder of Hairpin Region 1 and some of the linear tracrRNA between Hairpin Region 1 and Hairpin Region 2. RNA Segment 3 (about 35 nucleotides) contains the remainder of the linear tracrRNA between Hairpin Region 1 and Hairpin Region 2 and all of Hairpin Region 2. In this example, RNA Segments 2 and 3 are linked, 5′ to 3′, using click chemistry. Further, the 5′ and 3′ end termini of the reaction product are both phosphorylated. The reaction product is then contacted with RNA Segment 1, having a 3′ terminal hydroxyl group, and T4 RNA ligase to produce a guide RNA molecule.

[0256] A number of additional linking chemistries may be used to connect RNA segments according to method of the invention. Some of these chemistries are set out in Table 6 of US20160102322A1, which is incorporated herein by reference in its entirety.

[0257] Gene Writers, e.g. Thermostable Gene Writers

[0258] While not wishing to be bound by theory, in some embodiments, retrotransposases that evolved in cold environments may not function as well at human body temperature. This application provides a number of thermostable Gene Writers, including proteins derived from avian retrotransposases. Exemplary avian transposase sequences in Table 3 include those of Taeniopygia guttata (zebra finch; transposon name R2-1_TG), Geospizafortis (medium ground finch; transposon name R2-1_Gfo), Zonotrichia albicollis (white-throated sparrow; transposon name R2-1_ZA), and Tinamus guttatus (white-throated tinamou; transposon name R2-1_TGut).

[0259] Thermostability may be measured, e.g., by testing the ability of a Gene Writer to polymerize DNA in vitro at a high temperature (e.g., 37° C.) and a low temperature (e.g., 25° C.). Suitable conditions for assaying in vitro DNA polymerization activity (e.g., processivity) are described, e.g., in Bibillo and Eickbush, “High Processivity of the Reverse Transcriptase from a Non-long Terminal Repeat Retrotransposon” (2002) JBC 277, 34836-34845. In some embodiments, the thermostable Gene Writer polypeptide has an activity, e.g., a DNA polymerization activity, at 37° C. that is no less than 70%, 75%, 80%, 85%, 90%, or 95% of its activity at 25° C. under otherwise similar conditions.

[0260] In some embodiments, a GeneWriter polypeptide (e.g., a sequence of Table 1, 2, or 3 or a sequence having at least 70%, 75%, 80%, 85%, 90%, 95%, 96%, 97%, 98%, or 99% identity thereto) is stable in a subject chosen from a mammal (e.g., human) or a bird. In some embodiments, a GeneWriter polypeptide described herein is functional at 37° C. In some embodiments, a GeneWriter polypeptide described herein has greater activity at 37° C. than it does at a lower temperature, e.g., at 30° C., 25° C., or 20° C. In some embodiments, a GeneWriter polypeptide described herein has greater activity in a human cell than in a zebrafish cell.

[0261] In some embodiments, a GeneWriter polypeptide is active in a human cell cultured at 37° C., e.g., using an assay of Example 6 or Example 7 herein.

[0262] In some embodiments, the assay comprises steps of: (1) introducing HEK293T cells into one or more wells of 6.4 mm diameter, at 10,000 cells/well, (2) incubating the cells at 37° C. for 24 hr, (3) providing a transfection mixture comprising 0.5 μl if FuGENE® HD transfection reagent and 80 ng DNA (wherein the DNA is a plasmid comprising, in order, (a) CMV promoter, (b) 100 bp of sequence homologous to the 100 bp upstream of the target site, (c) sequence encoding a 5′ untranslated region that binds the GeneWriter protein, (d) sequence encoding the GeneWriter protein, (e) sequence encoding a 3′ untranslated region that binds the GeneWriter protein (f) 100 bp of sequence homologous to the 100 bp downstream of the target site, and (g) BGH polyadenylation sequence) and 10p Opti-MEM and incubating for 15 min at room temperature, (4) adding the transfection mixture to the cells, (5) incubating the cells for 3 days, and (6) assaying integration of the exogenous sequence into a target locus (e.g., rDNA) in the cell genome, e.g., wherein one or more of the preceding steps are performed as described in Example 6 herein.

[0263] In some embodiments, the GeneWriter polypeptide results in insertion of the heterologous object sequence (e.g., the GFP gene) into the target locus (e.g., rDNA) at an average copy number of at least 0.01, 0.025, 0.05, 0.075, 0.1, 0.15, 0.2, 0.25, 0.3, 0.4, 0.5, 0.75, 1, 1.25, 1.5, 1.75, 2, 2.5, 3, 4, or 5 copies per genome. In some embodiments, a cell described herein (e.g., a cell comprising a heterologous sequence at a target insertion site) comprises the heterologous object sequence at an average copy number of at least 0.01, 0.025, 0.05, 0.075, 0.1, 0.15, 0.2, 0.25, 0.3, 0.4, 0.5, 0.75, 1, 1.25, 1.5, 1.75, 2, 2.5, 3, 4, or 5 copies per genome.

[0264] In some embodiments, a GeneWriter causes integration of a sequence in a target RNA with relatively few truncation events at the terminus. For instance, in some embodiments, a Gene Writer protein (e.g., of SEQ ID NO: 1016) results in about 25-100%, 50-100%, 60-100%, 70-100%, 75-95%, 80%-90%, or 86.17% of integrants into the target site being non-truncated, as measured by an assay described herein, e.g., an assay of Example 6 and FIG. 8. In some embodiments, a Gene Writer protein (e.g., of SEQ ID NO: 1016) results in at least about 30%, 40%, 50%, 60%, 70%, 80%, or 90% of integrants into the target site being non-truncated, as measured by an assay described herein. In some embodiments, an integrant is classified as truncated versus non-truncated using an assay comprising amplification with a forward primer situated 565 bp from the end of the element (e.g., a wild-type transposon sequence, e.g., of Taeniopygia guttata) and a reverse primer situated in the genomic DNA of the target insertion site, e.g., rDNA. In some embodiments, the number of full-length integrants in the target insertion site is greater than the number of integrants truncated by 300-565 nucleotides in the target insertion site, e.g., the number of full-length integrants is at least 1.ix, 1.2×, 1.5×, 2×, 3×, 4×, 5×, 6×, 7×, 8×, 9×, or 10× the number of the truncated integrants, or the number of full-length integrants is at least 1.1×-10×, 2×-10×, 3×-10×, or 5×-10× the number of the truncated integrants.

[0265] In some embodiments, a system or method described herein results in insertion of the heterologous object sequence only at one target site in the genome of the target cell. Insertion can be measured, e.g., using a threshold of above 1%, 1.5%, 2%, 2.5%, 3%, 3.5%, 4%, 4.5%, 5%, e.g., as described in Example 8. In some embodiments, a system or method described herein results in insertion of the heterologous object sequence wherein less than 1%, 1.5%, 2%, 2.5%, 3%, 3.5%, 4%, 4.5%, 5%, 10%, 20%, 30%, 40%, or 50% of insertions are at a site other than the target site, e.g., using an assay described herein, e.g., an assay of Example 8.

[0266] In some embodiments, a system or method described herein results in “scarless” insertion of the heterologous object sequence, while in some embodiments, the target site can show deletions or duplications of endogenous DNA as a result of insertion of the heterologous sequence. The mechanisms of different retrotransposons could result in different patterns of duplications or deletions in the host genome occurring during retrotransposition at the target site. In some embodiments, the system results in a scarless insertion, with no duplications or deletions in the surrounding genomic DNA. In some embodiments, the system results in a deletion of less than 1, 2, 3, 4, 5, 10, 50, or 100 bp of genomic DNA upstream of the insertion. In some embodiments, the system results in a deletion of less than 1, 2, 3, 4, 5, 10, 50, or 100 bp of genomic DNA downstream of the insertion. In some embodiments, the system results in a duplication of less than 1, 2, 3, 4, 5, 10, 50, or 100 bp of genomic DNA upstream of the insertion. In some embodiments, the system results in a duplication of less than 1, 2, 3, 4, 5, 10, 50, or 100 bp of genomic DNA downstream of the insertion.

[0267] In some embodiments, a GeneWriter described herein, or a DNA-binding domain thereof, binds to its target site specifically, e.g., as measured using an assay of Example 21. In some embodiments, the GeneWriter or DNA-binding domain thereof binds to its target site more strongly than to any other binding site in the human genome. For example, in some embodiments, in an assay of Example 21, the target site represents more than 50%, 60%, 70%, 80%, 90%, or 95% of binding events of the GeneWriter or DNA-binding domain thereof to human genomic DNA.

[0268] Genetically Engineered, e.g., Dimerized GeneWriters

[0269] Some non-LTR retrotransposons utilize two subunits to complete retrotransposition (Christensen et al PNAS 2006). In some embodiments, a retrotransposase described herein comprises two connected subunits as a single polypeptide. For instance, two wild-type retrotransposases could be joined with a linker to form a covalently “dimerized” protein (see FIG. 17). In some embodiments, the nucleic acid coding for the retrotransposase codes for two retrotransposase subunits to be expressed as a single polypeptide. In some embodiments, the subunits are connected by a peptide linker, such as has been described herein in the section entitled “Linker” and, e.g., in Chen et al Adv Drug Deliv Rev 2013. In some embodiments, the two subunits in the polypeptide are connected by a rigid linker. In some embodiments, the rigid linker consists of the motif (EAAAK)ₙ (SEQ ID NO: 1534). In other embodiments, the two subunits in the polypeptide are connected by a flexible linker. In some embodiments, the flexible linker consists of the motif (Gly)ₙ. In some embodiments, the flexible linker consists of the motif (GGGGS)ₙ(SEQ ID NO: 1535). In some embodiments, the rigid or flexible linker consists of 1, 2, 3, 4, 5, 10, 15, or more amino acids in length to enable retrotransposition. In some embodiments, the linker consists of a combination of rigid and flexible linker motifs. In some embodiments, a Gene Writer polypeptide may comprise a linker, e.g., a peptide linker, e.g., a linker as described in Table 38. Table 38 provides linker sequences for increasing expression, stability, and function of Gene Writer polypeptides comprising multiple functional domains.

TABLE 38
Exemplary linker sequences

| | SEQ |
|---|---|
| | ID |
| Amino Acid Sequence | NO |
| GGS | |
| GGSGGS | 1702 |
| GGSGGSGGS | 1703 |
| GGSGGSGGSGGS | 1704 |
| GGSGGSGGSGGSGGS | 1705 |
| GGSGGSGGSGGSGGSGGS | 1706 |
| GGGGS | 1707 |
| GGGGSGGGGS | 1708 |
| GGGGSGGGGSGGGGS | 1709 |
| GGGGSGGGGSGGGGSGGGGS | 1710 |
| GGGGSGGGGSGGGGSGGGGSGGGGS | 1711 |
| GGGGSGGGGSGGGGSGGGGSGGGGSGGGGS | 1712 |
| GGG | |
| GGGG | 1714 |
| GGGGG | 1715 |
| GGGGGG | 1716 |
| GGGGGGG | 1717 |
| GGGGGGGG | 1718 |
| GSS | |
| GSSGSS | 1720 |
| GSSGSSGSS | 1721 |
| GSSGSSGSSGSS | 1722 |
| GSSGSSGSSGSSGSS | 1723 |
| GSSGSSGSSGSSGSSGSS | 1724 |
| EAAAK | 1725 |
| EAAAKEAAAK | 1726 |
| EAAAKEAAAKEAAAK | 1727 |
| EAAAKEAAAKEAAAKEAAAK | 1728 |
| EAAAKEAAAKEAAAKEAAAKEAAAK | 1729 |
| EAAAKEAAAKEAAAKEAAAKEAAAKEAAAK | 1730 |
| PAP | |
| PAPAP | 1732 |
| PAPAPAP | 1733 |
| PAPAPAPAP | 1734 |
| PAPAPAPAPAP | 1735 |
| PAPAPAPAPAPAP | 1736 |
| GGSGGG | 1737 |
| GGGGGS | 1738 |
| GGSGSS | 1739 |
| GSSGGS | 1740 |
| GGSEAAAK | 1741 |
| EAAAKGGS | 1742 |
| GGSPAP | 1743 |
| PAPGGS | 1744 |
| GGGGSS | 1745 |
| GSSGGG | 1746 |
| GGGEAAAK | 1747 |
| EAAAKGGG | 1748 |
| GGGPAP | 1749 |
| PAPGGG | 1750 |
| GSSEAAAK | 1751 |
| EAAAKGSS | 1752 |
| GSSPAP | 1753 |
| PAPGSS | 1754 |
| EAAAKPAP | 1755 |
| PAPEAAAK | 1756 |
| GGSGGGGSS | 1757 |
| GGSGSSGGG | 1758 |
| GGGGGSGSS | 1759 |
| GGGGSSGGS | 1760 |
| GSSGGSGGG | 1761 |
| GSSGGGGGS | 1762 |
| GGSGGGEAAAK | 1763 |
| GGSEAAAKGGG | 1764 |
| GGGGGSEAAAK | 1765 |
| GGGEAAAKGGS | 1766 |
| EAAAKGGSGGG | 1767 |
| EAAAKGGGGGS | 1768 |
| GGSGGGPAP | 1769 |
| GGSPAPGGG | 1770 |
| GGGGGSPAP | 1771 |
| GGGPAPGGS | 1772 |
| PAPGGSGGG | 1773 |
| PAPGGGGGS | 1774 |
| GGSGSSEAAAK | 1775 |
| GGSEAAAKGSS | 1776 |
| GSSGGSEAAAK | 1777 |
| GSSEAAAKGGS | 1778 |
| EAAAKGGSGSS | 1779 |
| EAAAKGSSGGS | 1780 |
| GGSGSSPAP | 1781 |
| GGSPAPGSS | 1782 |
| GSSGGSPAP | 1783 |
| GSSPAPGGS | 1784 |
| PAPGGSGSS | 1785 |
| PAPGSSGGS | 1786 |
| GGSEAAAKPAP | 1787 |
| GGSPAPEAAAK | 1788 |
| EAAAKGGSPAP | 1789 |
| EAAAKPAPGGS | 1790 |
| PAPGGSEAAAK | 1791 |
| PAPEAAAKGGS | 1792 |
| GGGGSSEAAAK | 1793 |
| GGGEAAAKGSS | 1794 |
| GSSGGGEAAAK | 1795 |
| GSSEAAAKGGG | 1796 |
| EAAAKGGGGSS | 1797 |
| EAAAKGSSGGG | 1798 |
| GGGGSSPAP | 1799 |
| GGGPAPGSS | 1800 |
| GSSGGGPAP | 1801 |
| GSSPAPGGG | 1802 |
| PAPGGGGSS | 1803 |
| PAPGSSGGG | 1804 |
| GGGEAAAKPAP | 1805 |
| GGGPAPEAAAK | 1806 |
| EAAAKGGGPAP | 1807 |
| EAAAKPAPGGG | 1808 |
| PAPGGGEAAAK | 1809 |
| PAPEAAAKGGG | 1810 |
| GSSEAAAKPAP | 1811 |
| GSSPAPEAAAK | 1812 |
| EAAAKGSSPAP | 1813 |
| EAAAKPAPGSS | 1814 |
| PAPGSSEAAAK | 1815 |
| PAPEAAAKGSS | 1816 |
| AEAAAKEAAAKEAAAKEAAAKALEAEAAAKEAAAKEAAAKE | 1817 |
| AAAKA | |
| GGGGSEAAAKGGGGS | 1818 |
| EAAAKGGGGSEAAAK | 1819 |
| SGSETPGTSESATPES | 1820 |
| GSAGSAAGSGEF | 1821 |
| SGGSSGGSSGSETPGTSESATPESSGGSSGGSS | 1822 |

[0270] Based on mechanism, not all functions are required from both retrotransposase subunits. In some embodiments, the fusion protein may consist of a fully functional subunit and a second subunit lacking one or more functional domains. In some embodiments, one subunit may lack reverse transcriptase functionality. In some embodiments, one subunit may lack the reverse transcriptase domain. In some embodiments, one subunit may possess only endonuclease activity.

[0271] In some embodiments, a GeneWriter described herein has a covalently dimerized configuration, e.g., as shown in any of FIGS. 17A-17F of PCT/US2019/048607, incorporated herein by reference. The proteins depicted are: FIG. 17A: a wild-type full length enzyme. FIG. 17B, two full-length enzymes (each comprising a DNA-binding domain, an RNA-binding domain, a reverse transcriptase domain, and an endonuclease domain) connected by a linker. FIG. 17C, a DNA binding domain and an RNA binding domain connected by a linker to a full-length enzyme. FIG. 17D, a DNA-binding domain and an RNA-binding domain connected by a linker to an RNA-binding domain, a reverse transcriptase domain, and an endonuclease domain. FIG. 17E, a DNA-binding domain connected by a first linker to an RNA-binding domain, which is connected by a second linker to a second RNA-binding domain, a reverse transcriptase domain, and an endonuclease domain. FIG. 17F, a DNA-binding domain connected by a first linker to an RNA-binding domain, which is connected by a second linker to a plurality of RNA-binding domains (in this figure, the molecule comprises three RNA-binding domains), which are connected by a linker to a reverse transcriptase domain and an endonuclease domain. In some embodiments, each R2 binds UTRs in the template RNA. In some embodiments, at least one module comprises a reverse transcriptase domain and an endonuclease domain. In some embodiments, the protein comprises a plurality of RNA-binding domains. In some embodiments, the modular system is split and is only active when it binds on DNA where the system uses two different DNA binding modules, e.g., a first protein comprising a first DNA binding module that is fused to an RNA binding module that recruits the RNA template for target primed reverse transcription, and second protein that comprises a second DNA binding module that binds at the site of intergration and is fused to the reverse transcription and endonuclease modules. In some embodiments, the nucleic acid encoding the GeneWriter comprises an intein such that the GeneWriter protein is expressed from two separate genes and is fused by protein splicing after being translated. In some embodiments, the GeneWriter is derived from a non-LTR protein, e.g., an R2 protein.

[0272] In some embodiments, one subunit may possess only an endonuclease domain. In some embodiments, the two subunits comprising the single polypeptide may provide complimentary functions.

[0273] In some embodiments, one subunit may lack endonuclease functionality. In some embodiments, one subunit may lack the endonuclease domain. In some embodiments, one subunit may possess only reverse transcriptase activity. In some embodiments, one subunit may possess only a reverse transcriptase domain. In some embodiments, one subunit may possess only DNA-dependent DNA synthesis functionality.

[0274] Linkers:

[0275] In some embodiments, domains of the compositions and systems described herein (e.g., the endonuclease and reverse transcriptase domains of a polypeptide or the DNA binding domain and reverse transcriptase domains of a polypeptide) may be joined by a linker. A composition described herein comprising a linker element has the general form S1-L-S2, wherein S1 and S2 may be the same or different and represent two domain moieties (e.g., each a polypeptide or nucleic acid domain) associated with one another by the linker. In some embodiments, a linker may connect two polypeptides. In some embodiments, a linker may connect two nucleic acid molecules. In some embodiments, a linker may connect a polypeptide and a nucleic acid molecule. A linker may be a chemical bond, e.g., one or more covalent bonds or non-covalent bonds. A linker may be flexible, rigid, and/or cleavable. In some embodiments, the linker is a peptide linker. Generally, a peptide linker is at least 2, 3, 4, 5, 6, 7, 8, 9, 10 or more amino acids in length, e.g., 2-50 amino acids in length, 2-30 amino acids in length.

[0276] The most commonly used flexible linkers have sequences consisting primarily of stretches of Gly and Ser residues (“GS” linker). Flexible linkers may be useful for joining domains that require a certain degree of movement or interaction and may include small, non-polar (e.g. Gly) or polar (e.g. Ser or Thr) amino acids. Incorporation of Ser or Thr can also maintain the stability of the linker in aqueous solutions by forming hydrogen bonds with the water molecules, and therefore reduce unfavorable interactions between the linker and the other moieties. Examples of such linkers include those having the structure [GGS]^{≥1} or [GGGS]^{≥1} (SEQ ID NO: 1536). Rigid linkers are useful to keep a fixed distance between domains and to maintain their independent functions. Rigid linkers may also be useful when a spatial separation of the domains is critical to preserve the stability or bioactivity of one or more components in the agent. Rigid linkers may have an alpha helix-structure or Pro-rich sequence, (XP)n, with X designating any amino acid, preferably Ala, Lys, or Glu. Cleavable linkers may release free functional domains in vivo. In some embodiments, linkers may be cleaved under specific conditions, such as the presence of reducing reagents or proteases. In vivo cleavable linkers may utilize the reversible nature of a disulfide bond. One example includes a thrombin-sensitive sequence (e.g., PRS) between the two Cys residues. In vitro thrombin treatment of CPRSC (SEQ ID NO: 1537) results in the cleavage of the thrombin-sensitive sequence, while the reversible disulfide linkage remains intact. Such linkers are known and described, e.g., in Chen et al. 2013. Fusion Protein Linkers: Property, Design and Functionality. Adv Drug Deliv Rev. 65(10): 1357-1369. In vivo cleavage of linkers in compositions described herein may also be carried out by proteases that are expressed in vivo under pathological conditions (e.g. cancer or inflammation), in specific cells or tissues, or constrained within certain cellular compartments. The specificity of many proteases offers slower cleavage of the linker in constrained compartments.

[0277] In some embodiments the amino acid linkers are (or are homologous to) the endogenous amino acids that exist between such domains in a native polypeptide. In some embodiments the endogenous amino acids that exist between such domains are substituted but the length is unchanged from the natural length. In some embodiments, additional amino acid residues are added to the naturally existing amino acid residues between domains.

[0278] In some embodiments, the amino acid linkers are designed computationally or screened to maximize protein function (Anad et al., FEBS Letters, 587:19, 2013).

[0279] In addition to being fully encoded on a single transcript, a polypeptide can be generated by separately expressing two or more polypeptide fragments that reconstitute the holoenzyme. In some embodiments, the Gene Writer polypeptide is generated by expressing as separate subunits that reassemble the holoenzyme through engineered protein-protein interactions. In some embodiments, reconstitution of the holoenzyme does not involve covalent binding between subunits. Peptides may also fuse together through trans-splicing of inteins (Tornabene et al. Sci Transl Med 11, eaav4523 (2019)). In some embodiments, the Gene Writer holoenzyme is expressed as separate subunits that are designed to create a fusion protein through the presence of split inteins in the subunits. In some embodiments, the Gene Writer holoenzyme is reconstituted through the formation of covalent linkages between subunits. In some embodiments, protein subunits reassemble through engineered protein-protein binding partners, e.g., SpyTag and SpyCatcher (Zakeri et al. PNAS 109, E690-E697 (2012)). In some embodiments, an additional domain described herein, e.g., a Cas9 nickase, is expressed as a separate polypeptide that associates with the Gene Writer polypeptide through covalent or non-covalent interactions as described above. In some embodiments, the breaking up of a Gene Writer polypeptide into subunits may aid in delivery of the protein by keeping the nucleic acid encoding each part within optimal packaging limits of a viral delivery vector, e.g., AAV (Tornabene et al. Sci Transl Med 11, eaav4523 (2019)). In some embodiments, the Gene Writer polypeptide is designed to be dimerized through the use of covalent or non-covalent interactions as described above.

[0280] In contrast to other types of reverse transcription machines, e.g., retroviral RTs and LTR retrotransposons, reverse transcription in non-LTR retrotransposons like R2 is performed only on RNA templates containing specific recognition sequences. The R2 retrotransposase requires its template to contain a minimal 3′ UTR region in order to initiate TPRT (Luan and Eickbush Mol Cell Biol 15, 3882-91 (1995)). In some embodiments, the Gene Writer polypeptide is derived from a retrotransposase with a required binding motif and the template RNA is designed to contain said binding motif, such that there is specific retrotransposition of only the desired template (see, e.g., Example 22). In some embodiments, the Gene Writer polypeptide is derived from a retrotransposon selected from Table 3 and the 3′ UTR on the RNA template comprises the 3′ UTR from the same retrotransposon in Table 3.

[0281] It is a known phenomenon that some mobile elements are capable of moving non-self elements, e.g., L1 retrotransposase facilitates the movement of non-autonomous Alu and SVA elements in the human genome (Craig, Mobile DNA III, ASM, ed. 3 (2105)). Recent studies have mapped various transposable elements present in the human genome, including non-LTR retrotransposons (Kojima Mobile DNA 9 (2018)). Given active transposition in the human genome has been linked to diseases, e.g., the role of LINE-1 retrotransposition in oncogenesis (Rodriguez-Martin et al. Nat Genet (2020)), it is desirable that a Gene Writer does not recognize and mobilize transposable elements or pseudoelements. In some embodiments, a Gene Writer polypeptide does not lead to the mobilization of any endogenous human DNA. In some embodiments, a Gene Writer is derived from a retrotransposase that is not present in the human genome. In some embodiments, a Gene Writer derived from a retrotransposase present in the human genome (see, for example, Kojima Mobile DNA 9 (2018)) is engineered such that it recognizes heterologous sequences in the template RNA and no longer recognizes the natural UTRs of the parental retrotransposon, e.g., has a heterologous RNA binding domain that does not associate with the 3′ UTR present in the human genome. In some embodiments, a Gene Writer comprises an RNA binding domain that does not recognize any sequences present in the human genome.

[0282] For optimizing protein expression, it can be helpful to provide tunable controls that can be used to modulate protein activity. In some embodiments, a tunable system may comprise at least one effector module that is responsive to at least one stimulus. The system may be, but is not limited to, a destabilizing domain (DD) system. This system is further taught in PCT/US2018/020704, as well as U.S. Provisional Patent Application No. 62/320,864 filed Apr. 11, 2016, 62/466,596 filed Mar. 3, 2017 and the International Publication WO2017/180587 (the contents each of which are herein incorporated by reference in their entirety). In some embodiments, the tunable system may comprise a first effector module. In some embodiments, the effector module may comprise a first stimulus response element (SRE) operably linked to at least one payload. In one aspect, the payload may be an immunotherapeutic agent. In one aspect, the first SRE of the composition may be responsive to or interact with at least one stimulus. In some embodiments, the first SRE may comprise a destabilizing domain (DD) The DD may be derived from a parent protein or from a mutant protein having one, two, three, or more amino acid mutations compared to the parent protein. In some embodiments, the parent protein may be selected from, but is not limited to, human protein FKBP, comprising the amino acid sequence of SEQ. ID NO. 3 of PCT/US2018/020704, incorporated herein by reference in its entirety, human DHFR (hDHFR), comprising the amino acid sequence of SEQ. ID NO. 2 of PCT/US2018/020704, incorporated herein by reference in its entirety; E. coli DHFR, comprising the amino acid sequence of SEQ. ID NO. 1 of PCT/US2018/020704, incorporated herein by reference in its entirety; PDE5, comprising the amino acid sequence of SEQ. ID NO. 4 of PCT/US2018/020704, incorporated herein by reference in its entirety; PPAR, gamma comprising the amino acid sequence of SEQ. ID NO. 5 of PCT/US2018/020704, incorporated herein by reference in its entirety; CA2, comprising the amino acid sequence of SEQ ID NO. 6 of PCT/1S2018/020704, incorporated herein by reference in its entirety; or NQ02, comprising the amino acid sequence of SEQ. ID NO 7 of PCT/US2018/020704, incorporated herein by reference in its entirety. In some embodiments, the tunable controls are applied to the Gene Writer polypeptide, such that, e.g., a DD and stimulus can be used to modulate template integration efficiency. In some embodiments, the tunable controls are applied to one or more peptides encoded within the heterologous object sequence of the template, such that, e.g., a DD and stimulus can be used to modulate activity of a genomically integrated payload. In certain embodiments, the payload comprising the DD may be a therapeutic protein, e.g., a functional copy of an endogenously mutated gene. In certain embodiments, the payload comprising the DD may be a heterologous protein, e.g., a CAR.

[0283] As used in the systems and methods provided here, Gene Writers™ may be provided as either polypeptides, or nucleic acids encoding them.

### Nucleic Acid Features

[0284] Elements of systems provided by the invention may be provided as nucleic acids, for example, a template nucleic acid (e.g., template RNA) as described, inter alia, in the claims and enumerated embodiments, as well as, in certain embodiments, a nucleic acid encoding a Gene Writer™ polypeptide (e.g., a retrotransposase). In various embodiments, the nucleic acids are in operative association with additional genetic elements, such as tissue-specific expression-control sequence(s) (e.g., tissue-specific promoters and tissue-specific microRNA recognition sequences), as well as additional elements, such as inverted repeats (e.g., inverted terminal repeats, such as elements from or derived from viruses, e.g., AAV ITRs) and tandem repeats, homology regions (segments with various degrees of homology to a target DNA), UTRs (5′, 3′, or both 5′ and 3′ UTRs), and various combinations of the foregoing. The nucleic acid elements of the systems provided by the invention can be provided in a variety of topologies, including single-stranded, double-stranded, circular, linear, linear with open ends, linear with closed ends, and particular versions of these, such as doggybone DNA (dbDNA), close-ended DNA (ceDNA).

[0285] In certain particular embodiments, tissue-specific expression-control sequence(s) refers to one or more of the sequences in: Table 3 of WO2020014209, incorporated herein by reference, omitting the last column thereof (SEQ ID NO reference); or Table 4 of WO2020014209, incorporated herein by reference, omitting the last column thereof (SEQ ID NO reference).

[0286] In some embodiments, a nucleic acid described herein (e.g., template nucleic acid or a template encoding a retrotransposase) comprises a promoter sequence, e.g., a tissue specific promoter. In some embodiments, the tissue-specific promoter is used to increase the target-cell specificity of a Gene Writer™ system. For instance, the promoter can be chosen on the basis that it is active in a target cell type but not active in (or active at a lower level in) a non-target cell type. Thus, even if the nucleic acid encoding the polypeptide was delivered into a non-target cell, it would not drive expression (or only drive low level expression) of the retrotransposase, limiting integration of the RNA template. A system having a tissue-specific promoter sequence in the retrotransposase DNA may also be used in combination with a microRNA binding site, e.g., encoded in the retrotransposase DNA, e.g., as described herein. A system having a tissue-specific promoter sequence in the retrotransposase DNA may also be used in combination with an RNA template containing a heterologous object sequence driven by a tissue-specific promoter, e.g., to achieve higher levels of integration and heterologous object sequence expression in target cells than in non-target cells.

[0287] In some embodiments, a nucleic acid described herein (e.g., an RNA encoding a Gene Writer™ polypeptide, or a DNA encoding the RNA, or a template nucleic acid) comprises a microRNA binding site. In some embodiments, the microRNA binding site is used to increase the target-cell specificity of a Gene Writer™ system. For instance, the microRNA binding site can be chosen on the basis that it is recognized by a miRNA that is present in a non-target cell type, but that is not present (or is present at a reduced level relative to the non-target cell) in a target cell type. Thus, when the RNA encoding the Gene Writer™ polypeptide is present in a non-target cell, it would be bound by the miRNA, and when the RNA encoding the Gene Writer™ polypeptide is present in a target cell, it would not be bound by the miRNA (or bound but at reduced levels relative to the non-target cell). While not wishing to be bound by theory, binding of the miRNA to the RNA encoding the Gene Writer™ polypeptide may reduce production of the Gene Writer™ polypeptide, e.g., by degrading the mRNA encoding the polypeptide or by interfering with translation. Accordingly, the heterologous object sequence would be inserted into the genome of target cells more efficiently than into the genome of non-target cells. A system having a microRNA binding site in the RNA encoding the Gene Writer™ polypeptide (or encoded in the DNA encoding the RNA) may also be used in combination with a template RNA regulated by a second microRNA binding site, e.g., as described herein in the section entitled “Template component of Gene Writer™ gene editor system.”

[0288] In some embodiments, a nucleic acid component of a system provided by the invention a sequence (e.g., retrotransposase or a heterologous object sequence) is flanked by untranslated regions (UTRs) that modify protein expression levels (sometimes referred to as UTRₑₓₚ) (FIGS. 11 and 15, Example 6). The effects of various 5′ and 3′ UTRs on protein expression are known in the art. For example, in some embodiments, the coding sequence may be preceded by a 5′ UTR that modifies RNA stability or protein translation. In some embodiments, the sequence may be followed by a 3′ UTR that modifies RNA stability or translation. In some embodiments, the sequence may be preceded by a 5′ UTR and followed by a 3′ UTR that modify RNA stability or translation. In some embodiments, the 5′ and/or 3′ UTR may be selected from the 5′ and 3′ UTRs of complement factor 3 (C3) (cactcctccccatcctctccctctgtccctctgtccctctgaccctgcactgtcccagcacc(SEQ ID NO: 1606)) or orosomucoid 1 (ORM1) (caggacacagccttggatcaggacagagacttgggggccatcctgcccctccaacccgacatgtgtacctcagctttttccctcacttgcat caataaagcttctgtgtttggaacagctaa(SEQ ID NO: 1607)) (Asrani et al. RNA Biology 2018). In certain embodiments, the 5′ UTR is the 5′ UTR from C3 and the 3′ UTR is the 3′ UTR from ORM1.

[0289] In certain embodiments, a 5′ UTR and 3′ UTR for protein expression, e.g., mRNA (or DNA encoding the RNA) for a Gene Writer polypeptide or heterologous object sequence, comprise optimized expression sequences. In some embodiments, the 5′ UTR comprises GGGAAAUAAGAGAGAAAAGAAGAGUAAGAAGAAAUAUAAGAGCCACC (SEQ ID NO: 1608) and/or the 3′ UTR comprising UGAUAAUAGGCUGGAGCCUCGGUGGCCAUGCUUCUUGCCCCUUGGGCCUCCCCCC AGCCCCUCCUCCCCUUCCUGCACCCGUACCCCCGUGGUCUUUGAAUAAAGUCUGA (SEQ ID NO: 1609), e.g., as described in Richner et al. Cell 168(6): P1114-1125 (2017), the sequences of which are incorporated herein by reference.

[0290] In some embodiments, a 5′ and/or 3′ UTR may be selected to enhance protein expression. In some embodiments, a 5′ and/or 3′ UTR may be selected to modify protein expression such that overproduction inhibition is minimized. In some embodiments, UTRs are around a coding sequence, e.g., outside the coding sequence and in other embodiments proximal to the coding sequence, In some embodiments additional regulatory elements (e.g., miRNA binding sites, cis-regulatory sites) are included in the UTRs.

[0291] In some embodiments, an open reading frame (ORF) of a Gene Writer system, e.g., an ORF of an mRNA (or DNA encoding an mRNA) encoding a Gene Writer polypeptide or one or more ORFs of an mRNA (or DNA encoding an mRNA) of a heterologous object sequence, is flanked by a 5′ and/or 3′ untranslated region (UTR) that enhances the expression thereof. In some embodiments, the 5′ UTR of an mRNA component (or transcript produced from a DNA component) of the system comprises the sequence 5′-GGGAAAUAAGAGAGAAAAGAAGAGUAAGAAGAAAUAUAAGAGCCACC-3′ (SEQ ID NO: 1610). In some embodiments, the 3′ UTR of an mRNA component (or transcript produced from a DNA component) of the system comprises the sequence 5′-UGAUAAUAGGCUGGAGCCUCGGUGGCCAUGCUUCUUGCCCCUUGGGCCUCCCCCC AGCCCCUCCUCCCCUUCCUGCACCCGUACCCCCGUGGUCUUUGAAUAAAGUCUGA-3′(SEQ ID NO: 1611). This combination of 5′ UTR and 3′ UTR has been shown to result in desirable expression of an operably linked ORF by Richner et al. Cell 168(6): P1114-1125 (2017), the teachings and sequences of which are incorporated herein by reference. In some embodiments, a system described herein comprises a DNA encoding a transcript, wherein the DNA comprises the corresponding 5′ UTR and 3′ UTR sequences, with T substituting for U in the above-listed sequence). In some embodiments, a DNA vector used to produce an RNA component of the system further comprises a promoter upstream of the 5′ UTR for initiating in vitro transcription, e.g, a T7, T3, or SP6 promoter. The 5′ UTR above begins with GGG, which is a suitable start for optimizing transcription using T7 RNA polymerase. For tuning transcription levels and altering the transcription start site nucleotides to fit alternative 5′ UTRs, the teachings of Davidson et al. Pac Symp Biocomput 433-443 (2010) describe T7 promoter variants, and the methods of discovery thereof, that fulfill both of these traits.

### Circular RNAs in Gene Writing Systems

[0292] Circular RNAs (circRNA) have been found to occur naturally in cells and have been found to have diverse functions, including both non-coding and protein coding roles in human cells. It has been shown that a circRNA can be engineered by incorporating a self-splicing intron into an RNA molecule (or DNA encoding the RNA molecule) that results in circularization of the RNA, and that an engineered circRNA can have enhanced protein production and stability (Wesselhoeft et al. Nature Communications 2018). It is contemplated that it may be useful to employ circular and/or linear RNA states during the formulation, delivery, or Gene Writing reaction within the target cell. Thus, in some embodiments of any of the aspects described herein, a Gene Writing system comprises one or more circular RNAs (circRNAs). In some embodiments of any of the aspects described herein, a Gene Writing system comprises one or more linear RNAs. In some embodiments, a nucleic acid as described herein (e.g., a nucleic acid molecule encoding a Gene Writer polypeptide, or both) is a circRNA. In some embodiments, a circular RNA molecule encodes the Gene Writer™ polypeptide. In some embodiments, the circRNA molecule encoding the Gene Writer™ polypeptide is delivered to a host cell. In some embodiments, a circular RNA molecule encodes a recombinase, e.g., as described herein. In some embodiments, the circRNA molecule encoding the recombinase is delivered to a host cell. In some embodiments, the circRNA molecule encoding the Gene Writer polypeptide is linearized (e.g., in the host cell) prior to translation.

[0293] In some embodiments, nucleic acid (e.g., encoding a Gene Writer polypeptide, or a template RNA, or both) is provided as circRNA. In some embodiments, the circRNA comprises one or more ribozyme sequences. In some embodiments, the ribozyme sequence is activated for autocleavage, e.g., in a host cell, e.g., thereby resulting in linearization of the circRNA. In some embodiments, the ribozyme is activated when the concentration of magnesium reaches a sufficient level for cleavage, e.g., in a host cell. In some embodiments the circRNA is maintained in a low magnesium environment prior to delivery to the host cell. In some embodiments, the ribozyme is a protein-responsive ribozyme. In some embodiments, the ribozyme is a nucleic acid-responsive ribozyme.

[0294] In some embodiments, the circRNA is linearized in the nucleus of a target cell. In some embodiments, linearization of a circRNA in the nucleus of a cell involves components present in the nucleus of the cell, e.g., to activate a cleavage event. For example, the B2 and ALU retrotransposons contain self-cleaving ribozymes whose activity is enhanced by interaction with the Polycomb protein, EZH2 (Hernandez et al. PNAS 117(1):415-425 (2020)). Thus, in some embodiments, a ribozyme, e.g., a ribozyme from a B2 or ALU element, that is responsive to a nuclear element, e.g., a nuclear protein, e.g., a genome-interacting protein, e.g., an epigenetic modifier, e.g., EZH2, is incorporated into a circRNA, e.g., of a Gene Writing system. In some embodiments, nuclear localization of the circRNA results in an increase in autocatalytic activity of the ribozyme and linearization of the circRNA.

[0295] In some embodiments, an inducible ribozyme (e.g., in a circRNA as described herein) is created synthetically, for example, by utilizing a protein ligand-responsive aptamer design. A system for utilizing the satellite RNA of tobacco ringspot virus hammerhead ribozyme with an MS2 coat protein aptamer has been described (Kennedy et al. Nucleic Acids Res 42(19):12306-12321 (2014), incorporated herein by reference in its entirety) that results in activation of the ribozyme activity in the presence of the MS2 coat protein. In embodiments, such a system responds to protein ligand localized to the cytoplasm or the nucleus. In some embodiments the protein ligand is not MS2. Methods for generating RNA aptamers to target ligands have been described, for example, based on the systematic evolution of ligands by exponential enrichment (SELEX) (Tuerk and Gold, Science 249(4968):505-510 (1990); Ellington and Szostak, Nature 346(6287):818-822 (1990); the methods of each of which are incorporated herein by reference) and have, in some instances, been aided by in silico design (Bell et al. PNAS 117(15):8486-8493, the methods of which are incorporated herein by reference). Thus, in some embodiments, an aptamer for a target ligand is generated and incorporated into a synthetic ribozyme system, e.g., to trigger ribozyme-mediated cleavage and circRNA linearization, e.g., in the presence of the protein ligand. In some embodiments, circRNA linearization is triggered in the cytoplasm, e.g., using an aptamer that associates with a ligand in the cytoplasm. In some embodiments, circRNA linearization is triggered in the nucleus, e.g., using an aptamer that associates with a ligand in the nucleus. In embodiments, the ligand in to the nucleus comprises an epigenetic modifier or a transcription factor. In some embodiments the ligand that triggers linearization is present at higher levels in on-target cells than off-target cells.

[0296] It is further contemplated that a nucleic acid-responsive ribozyme system can be employed for circRNA linearization. For example, biosensors that sense defined target nucleic acid molecules to trigger ribozyme activation are described, e.g., in Penchovsky (Biotechnology Advances 32(5):1015-1027 (2014), incorporated herein by reference). By these methods, a ribozyme naturally folds into an inactive state and is only activated in the presence of a defined target nucleic acid molecule (e.g., an RNA molecule). In some embodiments, a circRNA of a Gene Writing system comprises a nucleic acid-responsive ribozyme that is activated in the presence of a defined target nucleic acid, e.g., an RNA, e.g., an mRNA, miRNA, guide RNA, gRNA, sgRNA, ncRNA, lncRNA, tRNA, snRNA, or mtRNA. In some embodiments the nucleic acid that triggers linearization is present at higher levels in on-target cells than off-target cells.

[0297] In some embodiments of any of the aspects herein, a Gene Writing system incorporates one or more ribozymes with inducible specificity to a target tissue or target cell of interest, e.g., a ribozyme that is activated by a ligand or nucleic acid present at higher levels in a target tissue or target cell of interest. In some embodiments, the Gene Writing system incorporates a ribozyme with inducible specificity to a subcellular compartment, e.g., the nucleus, nucleolus, cytoplasm, or mitochondria. In some embodiments, the ribozyme that is activated by a ligand or nucleic acid present at higher levels in the target subcellular compartment. In some embodiments, an RNA component of a Gene Writing system is provided as circRNA, e.g., that is activated by linearization. In some embodiments, linearization of a circRNA encoding a Gene Writing polypeptide activates the molecule for translation. In some embodiments, a signal that activates a circRNA component of a Gene Writing system is present at higher levels in on-target cells or tissues, e.g., such that the system is specifically activated in these cells.

[0298] In some embodiments, an RNA component of a Gene Writing system is provided as a circRNA that is inactivated by linearization. In some embodiments, a circRNA encoding the Gene Writer polypeptide is inactivated by cleavage and degradation. In some embodiments, a circRNA encoding the Gene Writing polypeptide is inactivated by cleavage that separates a translation signal from the coding sequence of the polypeptide. In some embodiments, a signal that inactivates a circRNA component of a Gene Writing system is present at higher levels in off-target cells or tissues, such that the system is specifically inactivated in these cells.

[0299] In some embodiments, nucleic acid (e.g., encoding a Gene Writer polypeptide, or encoding a template RNA, or both) delivered to cells is covalently closed linear DNA, or so-called “doggybone” DNA. During its lifecycle, the bacteriophage N15 employs protelomerase to convert its genome from circular plasmid DNA to a linear plasmid DNA (Ravin et al. J Mol Biol 2001). This process has been adapted for the production of covalently closed linear DNA in vitro (see, for example, WO2010086626A1). In some embodiments, a protelomerase is contacted with a DNA containing one or more protelomerase recognition sites, wherein protelomerase results in a cut at the one or more sites and subsequent ligation of the complementary strands of DNA, resulting in the covalent linkage between the complementary strands. In some embodiments, nucleic acid (e.g., encoding a Gene Writer polypeptide, or encoding a template RNA, or both) is first generated as circular plasmid DNA containing a single protelomerase recognition site that is then contacted with protelomerase to yield a covalently closed linear DNA. In some embodiments, nucleic acid (e.g., encoding a transposase, or encoding a template RNA, or both) flanked by protelomerase recognition sites on plasmid or linear DNA is contacted with protelomerase to generate a covalently closed linear DNA containing only the DNA contained between the protelomerase recognition sites. In some embodiments, the approach of flanking the desired nucleic acid sequence by protelomerase recognition sites results in covalently closed circular DNA lacking plasmid elements used for bacterial cloning and maintenance. In some embodiments, the plasmid or linear DNA containing the nucleic acid and one or more protelomerase recognition sites is optionally amplified prior to the protelomerase reaction, e.g., by rolling circle amplification or PCR.

[0300] In some embodiments, nucleic acid (e.g., encoding a Gene Writer polypeptide, or encoding a template RNA, or both) delivered to cells is closed-ended, linear duplex DNA (CELiD DNA or ceDNA). In some embodiments, ceDNA is derived from the replicative form of the AAV genome (Li et al. PLoS One 2013). In some embodiments, the nucleic acid (e.g., encoding a Gene Writer polypeptide, or encoding a template RNA, or both) is flanked by ITRs, e.g., AAV ITRs, wherein at least one of the ITRs comprises a terminal resolution site and a replication protein binding site (sometimes referred to as a replicative protein binding site). In some embodiments, the ITRs are derived from an adeno-associated virus, e.g., AAV1, AAV2, AAV3, AAV4, AAV5, AAV6, AAV7, AAV8, AAV9, AAV10, AAV11, AAV12, or a combination thereof. In some embodiments, the ITRs are symmetric. In some embodiments, the ITRs are asymmetric. In some embodiments, at least one Rep protein is provided to enable replication of the construct. In some embodiments, the at least one Rep protein is derived from an adeno-associated virus, e.g., AAV1, AAV2, AAV3, AAV4, AAV5, AAV6, AAV7, AAV8, AAV9, AAV10, AAV11, AAV12, or a combination thereof. In some embodiments, ceDNA is generated by providing a production cell with (i) DNA flanked by ITRs, e.g., AAV ITRs, and (ii) components required for ITR-dependent replication, e.g., AAV proteins Rep78 and Rep52 (or nucleic acid encoding the proteins). In some embodiments, ceDNA is free of any capsid protein, e.g., is not packaged into an infectious AAV particle. In some embodiments, ceDNA is formulated into LNPs (see, for example, WO2019051289A1).

[0301] In some embodiments, the ceDNA vector consists of two self-complementary sequences, e.g., asymmetrical or symmetrical or substantially symmetrical ITRs as defined herein, flanking said expression cassette, wherein the ceDNA vector is not associated with a capsid protein. In some embodiments, the ceDNA vector comprises two self-complementary sequences found in an AAV genome, where at least one ITR comprises an operative Rep-binding element (RBE) (also sometimes referred to herein as “RBS”) and a terminal resolution site (trs) of AAV or a functional variant of the RBE. See, for example, WO2019113310.

[0302] In some embodiments, nucleic acid (e.g., encoding a Gene Writer polypeptide, or encoding a template RNA, or both) delivered to cells is designed as minicircles, where plasmid backbone sequences not pertaining to Gene Writing™ are removed before administration to cells. Minicircles have been shown to result in higher transfection efficiencies and gene expression as compared to plasmids with backbones containing bacterial parts (e.g., bacterial origin of replication, antibiotic selection cassette) and have been used to improve the efficiency of transposition (Sharma et al Mol Ther Nucleic Acids 2013). In some embodiments, the DNA vector encoding the Gene Writer™ polypeptide is delivered as a minicircle. In some embodiments, the DNA vector encoding the Gene Writer™ template is delivered as a minicircle. In some embodiments, the bacterial parts are flanked by recombination sites, e.g., attP/attB, loxP, FRT sites. In some embodiments, the addition of a cognate recombinase results in intramolecular recombination and excision of the bacterial parts. In some embodiments, the recombinase sites are recognized by phiC31 recombinase. In some embodiments, the recombinase sites are recognized by Cre recombinase. In some embodiments, the recombinase sites are recognized by FLP recombinase. In addition to plasmid DNA, minicircles can be generated by excising the desired construct, e.g., Gene Writer polypeptide expression cassette or template RNA expression cassette, from a viral backbone. Previously, it has been shown that excision and circularization of the donor sequence from a viral backbone may be important for transposase-mediated integration efficiency (Yant et al Nat Biotechnol 2002). In some embodiments, minicircles are first formulated and then delivered to target cells. In other embodiments, minicircles are formed from a DNA vector (e.g., plasmid DNA, rAAV, scAAV, ceDNA, doggybone DNA) intracellularly by co-delivery of a recombinase, resulting in excision and circularization of the recombinase recognition site-flanked nucleic acid, e.g., a nucleic acid encoding the Gene Writer™ polypeptide, or encoding an RNA template, or both.

### Viral Vectors and Components Thereof

[0303] Viruses are a useful source of delivery vehicles for the systems described herein, in addition to a source of relevant enzymes or domains as described herein, e.g., as sources of polymerases and polymerase functions used herein, e.g., DNA-dependent DNA polymerase, RNA-dependent RNA polymerase, RNA-dependent DNA polymerase, DNA-dependent RNA polymerase, reverse transcriptase. Some enzymes, e.g., reverse transcriptases, may have multiple activities, e.g., be capable of both RNA-dependent DNA polymerization and DNA-dependent DNA polymerization, e.g., first and second strand synthesis. In some embodiments, the virus used as a Gene Writer delivery system or a source of components thereof may be selected from a group as described by Baltimore Bacteriol Rev 35(3):235-241 (1971).

[0304] In some embodiments, the virus is selected from a Group I virus, e.g., is a DNA virus and packages dsDNA into virions. In some embodiments, the Group I virus is selected from, e.g., Adenoviruses, Herpesviruses, Poxviruses.

[0305] In some embodiments, the virus is selected from a Group II virus, e.g., is a DNA virus and packages ssDNA into virions. In some embodiments, the Group II virus is selected from, e.g., Parvoviruses. In some embodiments, the parvovirus is a dependoparvovirus, e.g., an adeno-associated virus (AAV).

[0306] In some embodiments, the virus is selected from a Group III virus, e.g., is an RNA virus and packages dsRNA into virions. In some embodiments, the Group III virus is selected from, e.g., Reoviruses. In some embodiments, one or both strands of the dsRNA contained in such virions is a coding molecule able to serve directly as mRNA upon transduction into a host cell, e.g., can be directly translated into protein upon transduction into a host cell without requiring any intervening nucleic acid replication or polymerization steps.

[0307] In some embodiments, the virus is selected from a Group IV virus, e.g., is an RNA virus and packages ssRNA(+) into virions. In some embodiments, the Group IV virus is selected from, e.g., Coronaviruses, Picornaviruses, Togaviruses. In some embodiments, the ssRNA(+) contained in such virions is a coding molecule able to serve directly as mRNA upon transduction into a host cell, e.g., can be directly translated into protein upon transduction into a host cell without requiring any intervening nucleic acid replication or polymerization steps.

[0308] In some embodiments, the virus is selected from a Group V virus, e.g., is an RNA virus and packages ssRNA(−) into virions. In some embodiments, the Group V virus is selected from, e.g., Orthomyxoviruses, Rhabdoviruses. In some embodiments, an RNA virus with an ssRNA(−) genome also carries an enzyme inside the virion that is transduced to host cells with the viral genome, e.g., an RNA-dependent RNA polymerase, capable of copying the ssRNA(−) into ssRNA(+) that can be translated directly by the host.

[0309] In some embodiments, the virus is selected from a Group VI virus, e.g., is a retrovirus and packages ssRNA(+) into virions. In some embodiments, the Group VI virus is selected from, e.g., Retroviruses. In some embodiments, the retrovirus is a lentivirus, e.g., HIV-1, HIV-2, SIV, BIV. In some embodiments, the retrovirus is a spumavirus, e.g., a foamy virus, e.g., HFV, SFV, BFV. In some embodiments, the ssRNA(+) contained in such virions is a coding molecule able to serve directly as mRNA upon transduction into a host cell, e.g., can be directly translated into protein upon transduction into a host cell without requiring any intervening nucleic acid replication or polymerization steps. In some embodiments, the ssRNA(+) is first reverse transcribed and copied to generate a dsDNA genome intermediate from which mRNA can be transcribed in the host cell. In some embodiments, an RNA virus with an ssRNA(+) genome also carries an enzyme inside the virion that is transduced to host cells with the viral genome, e.g., an RNA-dependent DNA polymerase, capable of copying the ssRNA(+) into dsDNA that can be transcribed into mRNA and translated by the host. In some embodiments, the reverse transcriptase from a Group VI retrovirus is incorporated as the reverse transcriptase domain of a Gene Writer polypeptide.

[0310] In some embodiments, the virus is selected from a Group VII virus, e.g., is a retrovirus and packages dsRNA into virions. In some embodiments, the Group VII virus is selected from, e.g., Hepadnaviruses. In some embodiments, one or both strands of the dsRNA contained in such virions is a coding molecule able to serve directly as mRNA upon transduction into a host cell, e.g., can be directly translated into protein upon transduction into a host cell without requiring any intervening nucleic acid replication or polymerization steps. In some embodiments, one or both strands of the dsRNA contained in such virions is first reverse transcribed and copied to generate a dsDNA genome intermediate from which mRNA can be transcribed in the host cell. In some embodiments, an RNA virus with a dsRNA genome also carries an enzyme inside the virion that is transduced to host cells with the viral genome, e.g., an RNA-dependent DNA polymerase, capable of copying the dsRNA into dsDNA that can be transcribed into mRNA and translated by the host. In some embodiments, the reverse transcriptase from a Group VII retrovirus is incorporated as the reverse transcriptase domain of a Gene Writer polypeptide.

[0311] In some embodiments, virions used to deliver nucleic acid in this invention may also carry enzymes involved in the process of Gene Writing. For example, a retroviral virion may contain a reverse transcriptase domain that is delivered into a host cell along with the nucleic acid. In some embodiments, an RNA template may be associated with a Gene Writer polypeptide within a virion, such that both are co-delivered to a target cell upon transduction of the nucleic acid from the viral particle. In some embodiments, the nucleic acid in a virion may comprise DNA, e.g., linear ssDNA, linear dsDNA, circular ssDNA, circular dsDNA, minicircle DNA, dbDNA, ceDNA. In some embodiments, the nucleic acid in a virion may comprise RNA, e.g., linear ssRNA, linear dsRNA, circular ssRNA, circular dsRNA. In some embodiments, a viral genome may circularize upon transduction into a host cell, e.g., a linear ssRNA molecule may undergo a covalent linkage to form a circular ssRNA, a linear dsRNA molecule may undergo a covalent linkage to form a circular dsRNA or one or more circular ssRNA. In some embodiments, a viral genome may replicate by rolling circle replication in a host cell. In some embodiments, a viral genome may comprise a single nucleic acid molecule, e.g., comprise a non-segmented genome. In some embodiments, a viral genome may comprise two or more nucleic acid molecules, e.g., comprise a segmented genome. In some embodiments, a nucleic acid in a virion may be associated with one or proteins. In some embodiments, one or more proteins in a virion may be delivered to a host cell upon transduction. In some embodiments, a natural virus may be adapted for nucleic acid delivery by the addition of virion packaging signals to the target nucleic acid, wherein a host cell is used to package the target nucleic acid containing the packaging signals.

[0312] In some embodiments, a virion used as a delivery vehicle may comprise a commensal human virus. In some embodiments, a virion used as a delivery vehicle may comprise an anellovirus, the use of which is described in WO2018232017A1, which is incorporated herein by reference in its entirety.

[0313] Adeno-Associated Viruses

[0314] In some embodiments, the virus is an adeno-associated virus (AAV). In some embodiments, the AAV genome comprises two genes that encode four replication proteins and three capsid proteins, respectively. In some embodiments, the genes are flanked on either side by 145-bp inverted terminal repeats (ITRs). In some embodiments, the virion comprises up to three capsid proteins (Vp1, Vp2, and/or Vp3), e.g., produced in a 1:1:10 ratio. In some embodiments, the capsid proteins are produced from the same open reading frame and/or from differential splicing (Vp1) and alternative translational start sites (Vp2 and Vp3, respectively). Generally, Vp3 is the most abundant subunit in the virion and participates in receptor recognition at the cell surface defining the tropism of the virus. In some embodiments, Vp1 comprises a phospholipase domain, e.g., which functions in viral infectivity, in the N-terminus of Vp1.

[0315] In some embodiments, packaging capacity of the viral vectors limits the size of the base editor that can be packaged into the vector. For example, the packaging capacity of the AAVs can be about 4.5 kb (e.g., about 3.0, 3.5, 4.0, 4.5, 5.0, 5.5, or 6.0 kb), e.g., including one or two inverted terminal repeats (ITRs), e.g., 145 base ITRs.

[0316] In some embodiments, recombinant AAV (rAAV) comprises cis-acting 145-bp ITRs flanking vector transgene cassettes, e.g., providing up to 4.5 kb for packaging of foreign DNA. Subsequent to infection, rAAV can, in some instances, express a fusion protein of the invention and persist without integration into the host genome by existing episomally in circular head-to-tail concatemers. rAAV can be used, for example, in vitro and in vivo. In some embodiments, AAV-mediated gene delivery requires that the length of the coding sequence of the gene is equal or greater in size than the wild-type AAV genome.

[0317] AAV delivery of genes that exceed this size and/or the use of large physiological regulatory elements can be accomplished, for example, by dividing the protein(s) to be delivered into two or more fragments. In some embodiments, the N-terminal fragment is fused to a split intein-N. In some embodiments, the C-terminal fragment is fused to a split intein-C. In embodiments, the fragments are packaged into two or more AAV vectors.

[0318] In some embodiments, dual AAV vectors are generated by splitting a large transgene expression cassette in two separate halves (5 and 3 ends, or head and tail), e.g., wherein each half of the cassette is packaged in a single AAV vector (of <5 kb). The re-assembly of the full-length transgene expression cassette can, in some embodiments, then be achieved upon co-infection of the same cell by both dual AAV vectors. In some embodiments, co-infection is followed by one or more of: (1) homologous recombination (HR) between 5 and 3 genomes (dual AAV overlapping vectors); (2) ITR-mediated tail-to-head concatemerization of 5 and 3 genomes (dual AAV trans-splicing vectors); and/or (3) a combination of these two mechanisms (dual AAV hybrid vectors). In some embodiments, the use of dual AAV vectors in vivo results in the expression of full-length proteins. In some embodiments, the use of the dual AAV vector platform represents an efficient and viable gene transfer strategy for transgenes of greater than about 4.0, 4.1, 4.2, 4.3, 4.4, 4.5, 4.6, 4.7, 4.8, 4.9, or 5.0 kb in size. In some embodiments, AAV vectors can also be used to transduce cells with target nucleic acids, e.g., in the in vitro production of nucleic acids and peptides. In some embodiments, AAV vectors can be used for in vivo and ex vivo gene therapy procedures (see, e.g., West et al., Virology 160:38-47 (1987); U.S. Pat. No. 4,797,368; WO 93/24641; Kotin, Human Gene Therapy 5:793-801 (1994); Muzyczka, J. Clin. Invest. 94:1351 (1994); each of which is incorporated herein by reference in their entirety). The construction of recombinant AAV vectors is described in a number of publications, including U.S. Pat. No. 5,173,414; Tratschin et al., Mol. Cell. Biol. 5:3251-3260 (1985); Tratschin, et al., Mol. Cell. Biol. 4:2072-2081 (1984); Hermonat & Muzyczka, PNAS 81:6466-6470 (1984); and Samulski et al., J. Virol. 63:03822-3828 (1989) (incorporated by reference herein in their entirety).

[0319] In some embodiments, a Gene Writer described herein (e.g., with or without one or more guide nucleic acids) can be delivered using AAV, lentivirus, adenovirus or other plasmid or viral vector types, in particular, using formulations and doses from, for example, U.S. Pat. No. 8,454,972 (formulations, doses for adenovirus), U.S. Pat. No. 8,404,658 (formulations, doses for AAV) and U.S. Pat. No. 5,846,946 (formulations, doses for DNA plasmids) and from clinical trials and publications regarding the clinical trials involving lentivirus, AAV and adenovirus. For example, for AAV, the route of administration, formulation and dose can be as described in U.S. Pat. No. 8,454,972 and as in clinical trials involving AAV. For Adenovirus, the route of administration, formulation and dose can be as described in U.S. Pat. No. 8,404,658 and as in clinical trials involving adenovirus. For plasmid delivery, the route of administration, formulation and dose can be as described in U.S. Pat. No. 5,846,946 and as in clinical studies involving plasmids. Doses can be based on or extrapolated to an average 70 kg individual (e.g. a male adult human), and can be adjusted for patients, subjects, mammals of different weight and species. Frequency of administration is within the ambit of the medical or veterinary practitioner (e.g., physician, veterinarian), depending on usual factors including the age, sex, general health, other conditions of the patient or subject and the particular condition or symptoms being addressed. In some embodiments, the viral vectors can be injected into the tissue of interest. For cell-type specific Gene Writing, the expression of the Gene Writer and optional guide nucleic acid can, in some embodiments, be driven by a cell-type specific promoter.

[0320] In some embodiments, AAV allows for low toxicity, for example, due to the purification method not requiring ultracentrifugation of cell particles that can activate the immune response. In some embodiments, AAV allows low probability of causing insertional mutagenesis, for example, because it does not substantially integrate into the host genome.

[0321] In some embodiments, AAV has a packaging limit of about 4.4, 4.5, 4.6, 4.7, or 4.75 kb. In some embodiments, a Gene Writer, promoter, and transcription terminator can fit into a single viral vector. SpCas9 (4.1 kb) may, in some instances, be difficult to package into AAV. Therefore, in some embodiments, a Gene Writer is used that is shorter in length than other Gene Writers or base editors. In some embodiments, the Gene Writers are less than about 4.5 kb, 4.4 kb, 4.3 kb, 4.2 kb, 4.1 kb, 4 kb, 3.9 kb, 3.8 kb, 3.7 kb, 3.6 kb, 3.5 kb, 3.4 kb, 3.3 kb, 3.2 kb, 3.1 kb, 3 kb, 2.9 kb, 2.8 kb, 2.7 kb, 2.6 kb, 2.5 kb, 2 kb, or 1.5 kb.

[0322] An AAV can be AAV1, AAV2, AAV5 or any combination thereof. In some embodiments, the type of AAV is selected with respect to the cells to be targeted; e.g., AAV serotypes 1, 2, 5 or a hybrid capsid AAV1, AAV2, AAV5 or any combination thereof can be selected for targeting brain or neuronal cells; or AAV4 can be selected for targeting cardiac tissue. In some embodiments, AAV8 is selected for delivery to the liver. Exemplary AAV serotypes as to these cells are described, for example, in Grimm, D. et al, J. Virol. 82: 5887-5911 (2008) (incorporated herein by reference in its entirety). In some embodiments, AAV refers all serotypes, subtypes, and naturally-occurring AAV as well as recombinant AAV. AAV may be used to refer to the virus itself or a derivative thereof. In some embodiments, AAV includes AAV1, AAV2, AAV3, AAV3B, AAV4, AAV5, AAV6, AAV6.2, AAV7, AAVrh.64R1, AAVhu.37, AAVrh.8, AAVrh.32.33, AAV8, AAV9, AAV-DJ, AAV2/8, AAVrhlO, AAVLK03, AV10, AAV11, AAV12, rhlO, and hybrids thereof, avian AAV, bovine AAV, canine AAV, equine AAV, primate AAV, nonprimate AAV, and ovine AAV. The genomic sequences of various serotypes of AAV, as well as the sequences of the native terminal repeats (TRs), Rep proteins, and capsid subunits are known in the art. Such sequences may be found in the literature or in public databases such as GenBank. Additional exemplary AAV serotypes are listed in Table 36.

TABLE 36
Exemplary AAV serotypes.

| Target Tissue | Vehicle | Reference |
|---|---|---|
| Liver | AAV (AAV8¹, AAVrh.8¹, | 1. Wang et al., Mol. Ther. 18, |
| | AAVhu.37¹, AAV2/8, | 118-25 (2010) |
| | AAV2/rh10², AAV9, AAV2, | |
| | NP403, NP5923, AAV3B⁵, | 2. Ginn et al., JHEP Reports, |
| | AAV-DJ⁴, AAV-LK01⁴, | 100065 (2019) |
| | AAV-LK02⁴, AAV-LK03⁴, | 3. Paulk et al., Mol. Ther. 26, |
| | AAV-LK19⁴ | 289-303 (2018). |
| | Adenovirus | 4. L. Lisowski et al.. Nature. |
| | (Ad5, HC-AdV⁶) | 506, 382-6 (2014). |
| | | 5. L. Wang et al., Mol. Ther. |
| | | 23, 1877-87 (2015). |
| | | 6. Hausi Mol Ther (2010) |
| Lung | AAV (AAV4, AAV5, | 1. Duncan et al., Mol Ther |
| | AAV6¹, AAV9, H22²) | Methods Clin Dev (2018) |
| | Adenovirus (Ad5, Ad3, | 2. Cooney et al., Am J Respir |
| | Ad21, Ad14)³ | Cell Mol Biol (2019) |
| | | 3. Li et al., Mol Ther Methods |
| | | Clin Dev (2019) |
| Skin | AAV (AAV6¹, | 1. Petek et al., Mol. Ther. |
| | AAV-LK19²) | (2010) |
| | | 2. L. Lisowski et al., Nature. |
| | | 506, 382-6 (2014). |
| HSCs | Adenovirus (HDAd5/35⁺⁺) | Wang et al. Blood Adv (2019) |

[0323] In some embodiments, a pharmaceutical composition (e.g., comprising an AAV as described herein) has less than 10% empty capsids, less than 8% empty capsids, less than 7% empty capsids, less than 500 empty capsids, less than 300 empty capsids, or less than 1% empty capsids. In some embodiments, the pharmaceutical composition has less than about 5% empty capsids. In some embodiments, the number of empty capsids is below the limit of detection. In some embodiments, it is advantageous for the pharmaceutical composition to have low amounts of empty capsids, e.g., because empty capsids may generate an adverse response (e.g., immune response, inflammatory response, liver response, and/or cardiac response), e.g., with little or no substantial therapeutic benefit.

[0324] In some embodiments, the residual host cell protein (rHCP) in the pharmaceutical composition is less than or equal to 100 ng/ml rHCP per 1×10¹³ vg/ml, e.g., less than or equal to 40 ng/ml rHCP per 1×10¹³ vg/ml or 1-50 ng/ml rHCP per 1×10¹³ vg/ml. In some embodiments, the pharmaceutical composition comprises less than 10 ng rHCP per 1.0×10¹³ vg, or less than 5 ng rHCP per 1.0×10¹³ vg, less than 4 ng rHCP per 1.0×10¹³ vg, or less than 3 ng rHCP per 1.0×10¹³ vg, or any concentration in between. In some embodiments, the residual host cell DNA (hcDNA) in the pharmaceutical composition is less than or equal to 5×10⁶ pg/ml hcDNA per 1×10¹³ vg/ml, less than or equal to 1.2×10⁶ pg/ml hcDNA per 1×10¹³ vg/ml, or 1×10⁵ pg/ml hcDNA per 1×10¹³ vg/ml. In some embodiments, the residual host cell DNA in said pharmaceutical composition is less than 5.0×10⁵ pg per 1×10¹³ vg, less than 2.0×10⁵ pg per 1.0×10¹³ vg, less than 1.1×10⁵ pg per 1.0×10¹³ vg, less than 1.0×10⁵ pg hcDNA per 1.0×10¹³ vg, less than 0.9×10⁵ pg hcDNA per 1.0×10¹³ vg, less than 0.8×10⁵ pg hcDNA per 1.0×10¹³ vg, or any concentration in between.

[0325] In some embodiments, the residual plasmid DNA in the pharmaceutical composition is less than or equal to 1.7×10⁵ pg/ml per 1.0×10¹³ vg/ml, or 1×10⁵ pg/ml per 1×1.0×10¹³ vg/ml, or 1.7×10⁶ pg/ml per 1.0×10¹³ vg/ml. In some embodiments, the residual DNA plasmid in the pharmaceutical composition is less than 10.0×10⁵ pg by 1.0×10¹³ vg, less than 8.0×10⁵ pg by 1.0×10¹³ vg or less than 6.8×10⁵ pg by 1.0×10¹³ vg. In embodiments, the pharmaceutical composition comprises less than 0.5 ng per 1.0×10¹³ vg, less than 0.3 ng per 1.0×10¹³ vg, less than 0.22 ng per 1.0×10¹³ vg or less than 0.2 ng per 1.0×10¹³ vg or any intermediate concentration of bovine serum albumin (BSA). In embodiments, the benzonase in the pharmaceutical composition is less than 0.2 ng by 1.0×10¹³ vg, less than 0.1 ng by 1.0×10¹³ vg, less than 0.09 ng by 1.0×10¹³ vg, less than 0.08 ng by 1.0×10¹³ vg or any intermediate concentration. In embodiments, Poloxamer 188 in the pharmaceutical composition is about 10 to 150 ppm, about 15 to 100 ppm or about 20 to 80 ppm. In embodiments, the cesium in the pharmaceutical composition is less than 50 pg/g (ppm), less than 30 pg/g (ppm) or less than 20 pg/g (ppm) or any intermediate concentration.

[0326] In embodiments, the pharmaceutical composition comprises total impurities, e.g., as determined by SDS-PAGE, of less than 10%, less than 8%, less than 7%, less than 6%, less than 5%, less than 4%, less than 3%, less than 2%, or any percentage in between. In embodiments, the total purity, e.g., as determined by SDS-PAGE, is greater than 90%, greater than 92%, greater than 93%, greater than 94%, greater than 95%, greater than 96%, greater than 97%, greater than 98%, or any percentage in between. In embodiments, no single unnamed related impurity, e.g., as measured by SDS-PAGE, is greater than 5%, greater than 4%, greater than 3% or greater than 2%, or any percentage in between. In embodiments, the pharmaceutical composition comprises a percentage of filled capsids relative to total capsids (e.g., peak 1+peak 2 as measured by analytical ultracentrifugation) of greater than 85%, greater than 86%, greater than 87%, greater than 88%, greater than 89%, greater than 90%, greater than 91%, greater than 91.9%, greater than 92%, greater than 93%, or any percentage in between. In embodiments of the pharmaceutical composition, the percentage of filled capsids measured in peak 1 by analytical ultracentrifugation is 20-80%, 25-75%, 30-75%, 35-75%, or 37.4-70.3%. In embodiments of the pharmaceutical composition, the percentage of filled capsids measured in peak 2 by analytical ultracentrifugation is 20-80%, 20-70%, 22-65%, 24-62%, or 24.9-60.1%.

[0327] In one embodiment, the pharmaceutical composition comprises a genomic titer of 1.0 to 5.0×10¹³ vg/mL, 1.2 to 3.0×10¹³ vg/mL or 1.7 to 2.3×10¹³ vg/ml. In one embodiment, the pharmaceutical composition exhibits a biological load of less than 5 CFU/mL, less than 4 CFU/mL, less than 3 CFU/mL, less than 2 CFU/mL or less than 1 CFU/mL or any intermediate contraction. In embodiments, the amount of endotoxin according to USP, for example, USP <85> (incorporated by reference in its entirety) is less than 1.0 EU/mL, less than 0.8 EU/mL or less than 0.75 EU/mL. In embodiments, the osmolarity of a pharmaceutical composition according to USP, for example, USP <785> (incorporated by reference in its entirety) is 350 to 450 mOsm/kg, 370 to 440 mOsm/kg or 390 to 430 mOsm/kg. In embodiments, the pharmaceutical composition contains less than 1200 particles that are greater than 25 μm per container, less than 1000 particles that are greater than 25 μm per container, less than 500 particles that are greater than 25 μm per container or any intermediate value. In embodiments, the pharmaceutical composition contains less than 10,000 particles that are greater than 10 μm per container, less than 8000 particles that are greater than 10 μm per container or less than 600 particles that are greater than 10 pm per container.

[0328] In one embodiment, the pharmaceutical composition has a genomic titer of 0.5 to 5.0×10¹³ vg/mL, 1.0 to 4.0×10¹³ vg/mL, 1.5 to 3.0×10¹³ vg/ml or 1.7 to 2.3×10¹³ vg/ml. In one embodiment, the pharmaceutical composition described herein comprises one or more of the following: less than about 0.09 ng benzonase per 1.0×10¹³ vg, less than about 30 pg/g (ppm) of cesium, about 20 to 80 ppm Poloxamer 188, less than about 0.22 ng BSA per 1.0×10¹³ vg, less than about 6.8×10 5 pg of residual DNA plasmid per 1.0×10¹³ vg, less than about 1.1×10⁵ pg of residual hcDNA per 1.0×10¹³ vg, less than about 4 ng of rHCP per 1.0×10¹³ vg, pH 7.7 to 8.3, about 390 to 430 mOsm/kg, less than about 600 particles that are >25 μm in size per container, less than about 6000 particles that are >10 μm in size per container, about 1.7×10¹³-2.3×10¹³ vg/mL genomic titer, infectious titer of about 3.9×10⁸ to 8.4×10¹⁰ IU per 1.0×10¹³ vg, total protein of about 100-300 pg per 1.0×10¹³ vg, mean survival of >24 days in A7SMA mice with about 7.5×10¹³ vg/kg dose of viral vector, about 70 to 130% relative potency based on an in vitro cell based assay and/or less than about 5% empty capsid. In various embodiments, the pharmaceutical compositions described herein comprise any of the viral particles discussed here, retain a potency of between ±20%, between +15%, between ±10% or within +5% of a reference standard. In some embodiments, potency is measured using a suitable in vitro cell assay or in vivo animal model.

[0329] Additional methods of preparation, characterization, and dosing AAV particles are taught in WO2019094253, which is incorporated herein by reference in its entirety.

[0330] Additional rAAV constructs that can be employed consonant with the invention include those described in Wang et al 2019, available at: //doi.org/10.1038/s41573-019-0012-9, including Table 1 thereof, which is incorporated by reference in its entirety.

[0331] Inteins

[0332] In some embodiments, as described in more detail below, Intein-N may be fused to the N-terminal portion of a first domain described herein, and and intein-C may be fused to the C-terminal portion of a second domain described herein for the joining of the N-terminal portion to the C-terminal portion, thereby joining the first and second domains. In some embodiments, the first and second domains are each independent chosen from a DNA binding domain, an RNA binding domain, an RT domain, and an endonuclease domain.

[0333] As used herein, “intein” refers to a self-splicing protein intron (e.g., peptide), e.g., which ligates flanking N-terminal and C-terminal exteins (e.g., fragments to be joined). An intein may, in some instances, comprise a fragment of a protein that is able to excise itself and join the remaining fragments (the exteins) with a peptide bond in a process known as protein splicing. Inteins are also referred to as “protein introns.” The process of an intein excising itself and joining the remaining portions of the protein is herein termed “protein splicing” or “intein-mediated protein splicing.” In some embodiments, an intein of a precursor protein (an intein containing protein prior to intein-mediated protein splicing) comes from two genes. Such intein is referred to herein as a split intein (e.g., split intein-N and split intein-C). For example, in cyanobacteria, DnaE, the catalytic subunit a of DNA polymerase III, is encoded by two separate genes, dnaE-n and dnaE-c. The intein encoded by the dnaE-n gene may be herein referred as “intein-N.” The intein encoded by the dnaE-c gene may be herein referred as “intein-C.”

[0334] Use of inteins for joining heterologous protein fragments is described, for example, in Wood et al., J. Biol. Chem. 289(21); 14512-9 (2014) (incorporated herein by reference in its entirety). For example, when fused to separate protein fragments, the inteins IntN and IntC may recognize each other, splice themselves out, and/or simultaneously ligate the flanking N- and C-terminal exteins of the protein fragments to which they were fused, thereby reconstituting a full-length protein from the two protein fragments.

[0335] In some embodiments, a synthetic intein based on the dnaE intein, the Cfa-N (e.g., split intein-N) and Cfa-C (e.g., split intein-C) intein pair, is used. Examples of such inteins have been described, e.g., in Stevens et al., J Am Chem Soc. 2016 Feb. 24; 138(7):2162-5 (incorporated herein by reference in its entirety). Non-limiting examples of intein pairs that may be used in accordance with the present disclosure include: Cfa DnaE intein, Ssp GyrB intein, Ssp DnaX intein, Ter DnaE3 intein, Ter ThyX intein, Rma DnaB intein and Cne Prp8 intein (e.g., as described in U.S. Pat. No. 8,394,604, incorporated herein by reference.

[0336] In some embodiments, Intein-N and intein-C may be fused to the N-terminal portion of the split Cas9 and the C-terminal portion of a split Cas9, respectively, for the joining of the N-terminal portion of the split Cas9 and the C-terminal portion of the split Cas9. For example, in some embodiments, an intein-N is fused to the C-terminus of the N-terminal portion of the split Cas9, i.e., to form a structure of N [N-terminal portion of the split Cas9]-[intein-N]˜ C. In some embodiments, an intein-C is fused to the N-terminus of the C-terminal portion of the split Cas9, i.e., to form a structure of N-[intein-C]-[C-terminal portion of the split Cas9]-C. The mechanism of intein-mediated protein splicing for joining the proteins the inteins are fused to (e.g., split Cas9) is described in Shah et al., Chem Sci. 2014; 5(1):446-461, incorporated herein by reference. Methods for designing and using inteins are known in the art and described, for example by WO2020051561, WO2014004336, WO2017132580, US20150344549, and US20180127780, each of which is incorporated herein by reference in their entirety.

[0337] In some embodiments, a split refers to a division into two or more fragments. In some embodiments, a split Cas9 protein or split Cas9 comprises a Cas9 protein that is provided as an N-terminal fragment and a C-terminal fragment encoded by two separate nucleotide sequences. The polypeptides corresponding to the N-terminal portion and the C-terminal portion of the Cas9 protein may be spliced to form a reconstituted Cas9 protein. In embodiments, the Cas9 protein is divided into two fragments within a disordered region of the protein, e.g., as described in Nishimasu et al., Cell, Volume 156, Issue 5, pp. 935-949, 2014, or as described in Jiang et al. (2016) Science 351: 867-871 and PDB file: 5F9R (each of which is incorporated herein by reference in its entirety). A disordered region may be determined by one or more protein structure determination techniques known in the art, including, without limitation, X-ray crystallography, NMR spectroscopy, electron microscopy (e.g., cryoEM), and/or in silico protein modeling. In some embodiments, the protein is divided into two fragments at any C, T, A, or S, e.g., within a region of SpCas9 between amino acids A292-G364, F445-K483, or E565-T637, or at corresponding positions in any other Cas9, Cas9 variant (e.g., nCas9, dCas9), or other napDNAbp. In some embodiments, protein is divided into two fragments at SpCas9 T310, T313, A456, S469, or C574. In some embodiments, the process of dividing the protein into two fragments is referred to as splitting the protein.

[0338] In some embodiments, a protein fragment ranges from about 2-1000 amino acids (e.g., between 2-10, 10-50, 50-100, 100-200, 200-300, 300-400, 400-500, 500-600, 600-700, 700-800, 800-900, or 900-1000 amino acids) in length. In some embodiments, a protein fragment ranges from about 5-500 amino acids (e.g., between 5-10, 10-50, 50-100, 100-200, 200-300, 300-400, or 400-500 amino acids) in length. In some embodiments, a protein fragment ranges from about 20-200 amino acids (e.g., between 20-30, 30-40, 40-50, 50-100, or 100-200 amino acids) in length.

[0339] In some embodiments, a portion or fragment of a Gene Writer (e.g., Cas9-R2Tg) is fused to an intein. The nuclease can be fused to the N-terminus or the C-terminus of the intein. In some embodiments, a portion or fragment of a fusion protein is fused to an intein and fused to an AAV capsid protein. The intein, nuclease and capsid protein can be fused together in any arrangement (e.g., nuclease-intein-capsid, intein-nuclease-capsid, capsid-intein-nuclease, etc.). In some embodiments, the N-terminus of an intein is fused to the C-terminus of a fusion protein and the C-terminus of the intein is fused to the N-terminus of an AAV capsid protein.

[0340] In some embodiments, an endonuclease domain (e.g., a nickase Cas9 domain) is fused to intein-N and a polypeptide comprising an RT domain is fused to an intein-C.

[0341] Exemplary nucleotide and amino acid sequences of interns are provided below:

DnaE Intein-N DNA:
(SEQ ID NO: 1612)
TGCCTGTCATACGAAACCGAGATACTGACAGTAGAATATGGCCTTCTGCC
AATCGGGAAGATTGTGGAGAAACGGATAGAATGCACAGTTTACTCTGTCG
ATAACAATGGTAACATTTATACTCAGCCAGTTGCCCAGTGGCACGACCGG
GGAGAGCAGGAAGTATTCGAATACTGTCTGGAGGATGGAAGTCTCATTAG
GGCCACTAAGGACCACAAATTTATGACAGTCGATGGCCAGATGCTGCCTA
TAGACGAAATCTTTGAGCGAGAGTTGGACCTCATGCGAGTTGACAACCTT
CCTAAT
DnaE Intein-N Protein:
(SEQ ID NO: 1613)
CLSYETEILTVEYGLLPIGKIVEKRIECTVYSVDNNGNIYTQPVAQWHDR
GEQEVFEYCLEDGSLIRATKDHKFMTVDGQMLPIDEIFERELDLMRVDNL
PN
DnaE Intein-C DNA:
(SEQ ID NO: 1614)
ATGATCAAGATAGCTACAAGGAAGTATCTTGGCAAACAAAACGTTTATGA
TATTGGAGTCGAAAGAGATCACAACTTTGCTCTGAAGAACGGATTCATAG
CTTCTAAT
Intein-C:
(SEQ ID NO: 1615)
MIKIATRKYLGKQNVYDIGVERDHNFALKNGFIASN
Cfa-N DNA:
(SEQ ID NO: 1616)
TGCCTGTCTTATGATACCGAGATACTTACCGTTGAATATGGCTTCTTGCC
TATTGGAAAGATTGTCGAAGAGAGAATTGAATGCACAGTATATACTGTAG
ACAAGAATGGTTTCGTTTACACACAGCCCATTGCTCAATGGCACAATCGC
GGCGAACAAGAAGTATTTGAGTACTGTCTCGAGGATGGAAGCATCATACG
AGCAACTAAAGATCATAAATTCATGACCACTGACGGGCAGATGTTGCCAA
TAGATGAGATATTCGAGCGGGGCTTGGATCTCAAACAAGTGGATGGATTG
CCA
Cfa-N Protein:
(SEQ ID NO: 1617)
CLSYDTEILTVEYGFLPIGKIVEERIECTVYTVDKNGFVYTQPIAQWHNR
GEQEVFEYCLEDGSIIRATKDHKFMTTDGQMLPIDEIFERGLDLKQVDGL
P
Cfa-C DNA:
(SEQ ID NO: 1618)
ATGAAGAGGACTGCCGATGGATCAGAGTTTGAATCTCCCAAGAAGAAGAG
GAAAGTAAAGATAATATCTCGAAAAAGTCTTGGTACCCAAAATGTCTATG
ATATTGGAGTGGAGAAAGATCACAACTTCCTTCTCAAGAACGGTCTCGTA
GCCAGCAAC
Cfa-C Protein:
(SEQ ID NO: 1619)
MKRTADGSEFESPKKKRKVKIISRKSLGTQNVYDIGVEKDHNFLLKNGLV
ASN

### Lipid Nanoparticles

[0342] The methods and systems provided by the invention, may employ any suitable carrier or delivery modality, including, in certain embodiments, lipid nanoparticles (LNPs). Lipid nanoparticles, in some embodiments, comprise one or more ionic lipids, such as non-cationic lipids (e.g., neutral or anionic, or zwitterionic lipids); one or more conjugated lipids (such as PEG-conjugated lipids or lipids conjugated to polymers described in Table 5 of WO2019217941; incorporated herein by reference in its entirety); one or more sterols (e.g., cholesterol); and, optionally, one or more targeting molecules (e.g., conjugated receptors, receptor ligands, antibodies); or combinations of the foregoing.

[0343] Lipids that can be used in nanoparticle formations (e.g., lipid nanoparticles) include, for example those described in Table 4 of WO2019217941, which is incorporated by reference e.g., a lipid-containing nanoparticle can comprise one or more of the lipids in table 4 of WO2019217941. Lipid nanoparticles can include additional elements, such as polymers, such as the polymers described in table 5 of WO2019217941, incorporated by reference.

[0344] In some embodiments, conjugated lipids, when present, can include one or more of PEG-diacylglycerol (DAG) (such as 1-(monomethoxy-polyethyleneglycol)-2,3-dimyristoylglycerol (PEG-DMG)), PEG-dialkyloxypropyl (DAA), PEG-phospholipid, PEG-ceramide (Cer), a pegylated phosphatidylethanoloamine (PEG-PE), PEG succinate diacylglycerol (PEGS-DAG) (such as 4-O-(2′,3′-di(tetradecanoyloxy)propyl-1-O-(w-methoxy(polyethoxy)ethyl) butanedioate (PEG-S-DMG)), PEG dialkoxypropylcarbam, N-(carbonyl-methoxypoly ethylene glycol 2000)-1,2-distearoyl-sn-glycero-3-phosphoethanolamine sodium salt, and those described in Table 2 of WO2019051289 (incorporated by reference), and combinations of the foregoing.

[0345] In some embodiments, sterols that can be incorporated into lipid nanoparticles include one or more of cholesterol or cholesterol derivatives, such as those in WO2009/127060 or US2010/0130588, which are incorporated by reference. Additional exemplary sterols include phytosterols, including those described in Eygeris et al (2020), dx.doi.org/10.1021/acs.nanolett.0c01386, incorporated herein by reference.

[0346] In some embodiments, the lipid particle comprises an ionizable lipid, a non-cationic lipid, a conjugated lipid that inhibits aggregation of particles, and a sterol. The amounts of these components can be varied independently and to achieve desired properties. For example, in some embodiments, the lipid nanoparticle comprises an ionizable lipid is in an amount from about 20 mol % to about 90 mol % of the total lipids (in other embodiments it may be 20-70% (mol), 30-60% (mol) or 40-50% (mol); about 50 mol % to about 90 mol % of the total lipid present in the lipid nanoparticle), a non-cationic lipid in an amount from about 5 mol % to about 30 mol % of the total lipids, a conjugated lipid in an amount from about 0.5 mol % to about 20 mol % of the total lipids, and a sterol in an amount from about 20 mol % to about 50 mol % of the total lipids. The ratio of total lipid to nucleic acid (e.g., encoding the Gene Writer or template nucleic acid) can be varied as desired. For example, the total lipid to nucleic acid (mass or weight) ratio can be from about 10:1 to about 30:1.

[0347] In some embodiments, an ionizable lipid may be a cationic lipid, a ionizable cationic lipid, e.g., a cationic lipid that can exist in a positively charged or neutral form depending on pH, or an amine-containing lipid that can be readily protonated. In some embodiments, the cationic lipid is a lipid capable of being positively charged, e.g., under physiological conditions. Exemplary cationic lipids include one or more amine group(s) which bear the positive charge. In some embodiments, the lipid particle comprises a cationic lipid in formulation with one or more of neutral lipids, ionizable amine-containing lipids, biodegradable alkyn lipids, steroids, phospholipids including polyunsaturated lipids, structural lipids (e.g., sterols), PEG, cholesterol and polymer conjugated lipids. In some embodiments, the cationic lipid may be an ionizable cationic lipid. An exemplary cationic lipid as disclosed herein may have an effective pKa over 6.0. In embodiments, a lipid nanoparticle may comprise a second cationic lipid having a different effective pKa (e.g., greater than the first effective pKa), than the first cationic lipid. A lipid nanoparticle may comprise between 40 and 60 mol percent of a cationic lipid, a neutral lipid, a steroid, a polymer conjugated lipid, and a therapeutic agent, e.g., a nucleic acid (e.g., RNA) described herein (e.g., a template nucleic acid or a nucleic acid encoding a GeneWriter), encapsulated within or associated with the lipid nanoparticle. In some embodiments, the nucleic acid is co-formulated with the cationic lipid. The nucleic acid may be adsorbed to the surface of an LNP, e.g., an LNP comprising a cationic lipid. In some embodiments, the nucleic acid may be encapsulated in an LNP, e.g., an LNP comprising a cationic lipid. In some embodiments, the lipid nanoparticle may comprise a targeting moiety, e.g., coated with a targeting agent. In embodiments, the LNP formulation is biodegradable. In some embodiments, a lipid nanoparticle comprising one or more lipid described herein, e.g., Formula (i), (ii), (ii), (vii) and/or (ix) encapsulates at least 1%, at least 5%, at least 10%, at least 20%, at least 30%, at least 40%, at least 50%, at least 60%, at least 70%, at least 80%, at least 90%, at least 92%, at least 95%, at least 97%, at least 98% or 100% of an RNA molecule, e.g., template RNA and/or a mRNA encoding the Gene Writer polypeptide.

[0348] In some embodiments, the lipid to nucleic acid ratio (mass/mass ratio; w/w ratio) can be in the range of from about 1:1 to about 25:1, from about 10:1 to about 14:1, from about 3:1 to about 15:1, from about 4:1 to about 10:1, from about 5:1 to about 9:1, or about 6:1 to about 9:1. The amounts of lipids and nucleic acid can be adjusted to provide a desired N/P ratio, for example, N/P ratio of 3, 4, 5, 6, 7, 8, 9, 10 or higher. Generally, the lipid nanoparticle formulation's overall lipid content can range from about 5 mg/ml to about 30 mg/mL.

[0349] Exemplary ionizable lipids that can be used in lipid nanoparticle formulations include, without limitation, those listed in Table 1 of WO2019051289, incorporated herein by reference. Additional exemplary lipids include, without limitation, one or more of the following formulae: X of US2016/0311759; I of US20150376115 or in US2016/0376224; I, II or III of US20160151284; I, IA, II, or IIA of US20170210967; I-c of US20150140070; A of US2013/0178541; I of US2013/0303587 or US2013/0123338; I of US2015/0141678; II, III, IV, or V of US2015/0239926; I of US2017/0119904; I or II of WO2017/117528; A of US2012/0149894; A of US2015/0057373; A of WO2013/116126; A of US2013/0090372; A of US2013/0274523; A of US2013/0274504; A of US2013/0053572; A of WO2013/016058; A of WO2012/162210; I of US2008/042973; I, II, III, or IV of US2012/01287670; I or II of US2014/0200257; I, II, or III of US2015/0203446; I or III of US2015/0005363; I, IA, IB, IC, ID, II, IIA, IIB, IIC, IID, or III-XXIV of US2014/0308304; of US2013/0338210; I, II, III, or IV of WO2009/132131; A of US2012/01011478; I or XXXV of US2012/0027796; XIV or XVII of US2012/0058144; of US2013/0323269; I of US2011/0117125; I, II, or III of US2011/0256175; I, II, III, IV, V, VI, VII, VIII, IX, X, XI, XII of US2012/0202871; I, II, III, IV, V, VI, VII, VIII, X, XII, XIII, XIV, XV, or XVI of US2011/0076335; I or II of US2006/008378; I of US2013/0123338; I or X-A-Y-Z of US2015/0064242; XVI, XVII, or XVIII of US2013/0022649; I, II, or III of US2013/0116307; I, II, or III of US2013/0116307; I or II of US2010/0062967; I-X of US2013/0189351; I of US2014/0039032; V of US2018/0028664; I of US2016/0317458; I of US2013/0195920; 5, 6, or 10 of U.S. Pat. No. 10,221,127; I11-3 of WO2018/081480; I-5 or I-8 of WO2020/081938; 18 or 25 of U.S. Pat. No. 9,867,888; A of US2019/0136231; II of WO2020/219876; 1 of US2012/0027803; OF-02 of US2019/0240349; 23 of U.S. Pat. No. 10,086,013; cKK-E12/A6 of Miao et al (2020); C12-200 of WO2010/053572; 7C1 of Dahlman et al (2017); 304-013 or 503-013 of Whitehead et al; TS-P4C2 of U.S. Pat. No. 9,708,628; I of WO2020/106946; I of WO2020/106946.

[0350] In some embodiments, the ionizable lipid is MC3 (6Z,9Z,28Z,3 lZ)-heptatriaconta-6,9,28,3 1-tetraen-19-yl-4-(dimethylamino) butanoate (DLin-MC3-DMA or MC3), e.g., as described in Example 9 of WO2019051289A9 (incorporated by reference herein in its entirety). In some embodiments, the ionizable lipid is the lipid ATX-002, e.g., as described in Example 10 of WO2019051289A9 (incorporated by reference herein in its entirety). In some embodiments, the ionizable lipid is (13Z,16Z)-A,A-dimethyl-3-nonyldocosa-13, 16-dien-1-amine (Compound 32), e.g., as described in Example 11 of WO2019051289A9 (incorporated by reference herein in its entirety). In some embodiments, the ionizable lipid is Compound 6 or Compound 22, e.g., as described in Example 12 of WO2019051289A9 (incorporated by reference herein in its entirety). In some embodiments, the ionizable lipid is heptadecan-9-yl 8-((2-hydroxyethyl)(6-oxo-6-(undecyloxy)hexyl)amino)octanoate (SM-102); e.g., as described in Example 1 of U.S. Pat. No. 9,867,888 (incorporated by reference herein in its entirety). In some embodiments, the ionizable lipid is 9Z,12Z)-3-((4,4-bis(octyloxy)butanoyl)oxy)-2-((((3-(diethylamino)propoxy)carbonyl)oxy)methyl)propyl octadeca-9,12-dienoate (LP01) e.g., as synthesized in Example 13 of WO2015/095340 (incorporated by reference herein in its entirety). In some embodiments, the ionizable lipid is Di((Z)-non-2-en-1-yl) 9-((4-dimethylamino)butanoyl)oxy)heptadecanedioate (L319), e.g. as synthesized in Example 7, 8, or 9 of US2012/0027803 (incorporated by reference herein in its entirety). In some embodiments, the ionizable lipid is 1,1′-((2-(4-(2-((2-(Bis(2-hydroxydodecyl)amino)ethyl)(2-hydroxydodecyl) amino)ethyl)piperazin-1-yl)ethyl)azanediyl)bis(dodecan-2-ol) (C12-200), e.g., as synthesized in Examples 14 and 16 of WO2010/053572 (incorporated by reference herein in its entirety). In some embodiments, the ionizable lipid is; Imidazole cholesterol ester (ICE) lipid (3S, 10R, 13R, 17R)-10, 13-dimethyl-17-((R)-6-methylheptan-2-yl)-2, 3, 4, 7, 8, 9, 10, 11, 12, 13, 14, 15, 16, 17-tetradecahydro-1H-cyclopenta[a]phenanthren-3-yl 3-(1H-imidazol-4-yl)propanoate, e.g., Structure (I) from WO2020/106946 (incorporated by reference herein in its entirety).

[0351] Some non-limiting example of lipid compounds that may be used (e.g., in combination with other lipid components) to form lipid nanoparticles for the delivery of compositions described herein, e.g., nucleic acid (e.g., RNA) described herein (e.g., a template nucleic acid or a nucleic acid encoding a GeneWriter) includes,

[chemical structure]

[0352] In some embodiments an LNP comprising Formula (i) is used to deliver a GeneWriter composition described herein to the liver and/or hepatocyte cells.

[chemical structure]

[0353] In some embodiments an LNP comprising Formula (ii) is used to deliver a GeneWriter composition described herein to the liver and/or hepatocyte cells.

[chemical structure]

[0354] In some embodiments an LNP comprising Formula (iii) is used to deliver a GeneWriter composition described herein to the liver and/or hepatocyte cells.

[chemical structure]

[0355] In some embodiments an LNP comprising Formula (v) is used to deliver a GeneWriter composition described herein to the liver and/or hepatocyte cells.

[chemical structure]

[0356] In some embodiments an LNP comprising Formula (vi) is used to deliver a GeneWriter composition described herein to the liver and/or hepatocyte cells.

[chemical structure]

[0357] In some embodiments an LNP comprising Formula (viii) is used to deliver a GeneWriter composition described herein to the liver and/or hepatocyte cells.

[chemical structure]

[0358] In some embodiments an LNP comprising Formula (ix) is used to deliver a GeneWriter composition described herein to the liver and/or hepatocyte cells.

[chemical structure]

wherein
X¹ is O, NR¹, or a direct bond, X¹ is C2-5 alkylene, X³ is C(=0) or a direct bond, R¹ is H or Me, R³ is Ci-3 alkyl, R² is Ci-3 alkyl, or R² taken together with the nitrogen atom to which it is attached and 1-3 carbon atoms of X² form a 4-, 5-, or 6-membered ring, or X¹ is NR¹, R¹ and R² taken together with the nitrogen atoms to which they are attached form a 5- or 6-membered ring, or R² taken together with R³ and the nitrogen atom to which they are attached form a 5-, 6-, or 7-membered ring. Y¹ is C2-12 alkylene, Y² is selected from

[chemical structure]

n is 0 to 3, R⁴ is Ci-15 alkyl, Z¹ is Ci-6 alkylene or a direct bond,

### Z² is

[chemical structure]

(in either orientation) or absent, provided that if Z¹ is a direct bond, Z² is absent;
R⁵ is C5-9 alkyl or C6-10 alkoxy, R⁶ is C5-9 alkyl or C6-10 alkoxy. W is methylene or a direct bond, and
R⁷ is H or Me. or a salt thereof, provided that if R³ and R² are C2 alkyls, X¹ is O, X² is linear C3 alkylene,
X³ is C(=0), Y¹ is linear Ce alkylene, (Y²)n-R⁴ is

[chemical structure]

R⁴ is linear C5 alkyl, Z¹ is C2 alkylene, Z² is absent, W is methylene, and R⁷ is H, then R⁵ and R⁶ are not Cx alkoxy.
In some embodiments an LNP comprising Formula (xii) is used to deliver a GeneWriter composition described herein to the liver and/or hepatocyte cells.

[chemical structure]

[0360] In some embodiments an LNP comprising Formula (xi) is used to deliver a GeneWriter composition described herein to the liver and/or hepatocyte cells.

[chemical structure]

[0361] In some embodiments an LNP comprises a compound of Formula (xiii) and a compound of Formula (xiv).

[chemical structure]

In some embodiments an LNP comprising Formula (xv) is used to deliver a GeneWriter composition described herein to the liver and/or hepatocyte cells.

[chemical structure]

[0362] In some embodiments an LNP comprising a formulation of Formula (xvi) is used to deliver a GeneWriter composition described herein to the lung endothelial cells.

[chemical structure]

[0363] In some embodiments, a lipid compound used to form lipid nanoparticles for the delivery of compositions described herein, e.g., nucleic acid (e.g., RNA) described herein (e.g., a template nucleic acid or a nucleic acid encoding a GeneWriter) is made by one of the following reactions:

[chemical structure]

[0364] Exemplary non-cationic lipids include, but are not limited to, distearoyl-sn-glycero-phosphoethanolamine, distearoylphosphatidylcholine (DSPC), dioleoylphosphatidylcholine (DOPC), dipalmitoylphosphatidylcholine (DPPC), dioleoylphosphatidylglycerol (DOPG), dipalmitoylphosphatidylglycerol (DPPG), dioleoyl-phosphatidylethanolamine (DOPE), 1,2-dioleoyl-sn-glycero-3-phosphoethanolamine (DOPE), palmitoyloleoylphosphatidylcholine (POPC), palmitoyloleoylphosphatidylethanolamine (POPE), dioleoyl-phosphatidylethanolamine 4-(N-maleimidomethyl)-cyclohexane-1-carboxylate (DOPE-mal), dipalmitoyl phosphatidyl ethanolamine (DPPE), dimyristoylphosphoethanolamine (DMPE), distearoyl-phosphatidylethanolamine (DSPE), monomethyl-phosphatidylethanolamine (such as 16-O-monomethyl PE), dimethyl-phosphatidylethanolamine (such as 16-O-dimethyl PE), 18-1-trans PE, 1-stearoyl-2-oleoyl-phosphatidyethanolamine (SOPE), hydrogenated soy phosphatidylcholine (HSPC), egg phosphatidylcholine (EPC), dioleoylphosphatidylserine (DOPS), sphingomyelin (SM), dimyristoyl phosphatidylcholine (DMPC), dimyristoyl phosphatidylglycerol (DMPG), distearoylphosphatidylglycerol (DSPG), dierucoylphosphatidylcholine (DEPC), palmitoyloleyolphosphatidylglycerol (POPG), dielaidoyl-phosphatidylethanolamine (DEPE), lecithin, phosphatidylethanolamine, lysolecithin, lysophosphatidylethanolamine, phosphatidylserine, phosphatidylinositol, sphingomyelin, egg sphingomyelin (ESM), cephalin, cardiolipin, phosphatidicacid, cerebrosides, dicetylphosphate, lysophosphatidylcholine, dilinoleoylphosphatidylcholine, or mixtures thereof. It is understood that other diacylphosphatidylcholine and diacylphosphatidylethanolamine phospholipids can also be used. The acyl groups in these lipids are preferably acyl groups derived from fatty acids having C10-C24 carbon chains, e.g., lauroyl, myristoyl, paimitoyl, stearoyl, or oleoyl. Additional exemplary lipids, in certain embodiments, include, without limitation, those described in Kim et al. (2020) dx.doi.org/10.1021/acs.nanolett.Oc01386, incorporated herein by reference. Such lipids include, in some embodiments, plant lipids found to improve liver transfection with mRNA (e.g., DGTS).

[0365] In some embodiments, the non-cationic lipid may have the following structure

[chemical structure]

[0366] Other examples of non-cationic lipids suitable for use in the lipid nanopartieles include, without limitation, nonphosphorous lipids such as, e.g., stearylamine, dodeeylamine, hexadecylamine, acetyl palmitate, glycerol ricinoleate, hexadecyl stereate, isopropyl myristate, amphoteric acrylic polymers, triethanolamine-lauryl sulfate, alkyl-aryl sulfate polyethyloxylated fatty acid amides, dioctadecyl dimethyl ammonium bromide, ceramide, sphingomyelin, and the like. Other non-cationic lipids are described in WO2017/099823 or US patent publication US2018/0028664, the contents of which is incorporated herein by reference in their entirety.

[0367] In some embodiments, the non-cationic lipid is oleic acid or a compound of Formula I, II, or IV of US2018/0028664, incorporated herein by reference in its entirety. The non-cationic lipid can comprise, for example, 0-30% (mol) of the total lipid present in the lipid nanoparticle. In some embodiments, the non-cationic lipid content is 5-20% (mol) or 10-15% (mol) of the total lipid present in the lipid nanoparticle. In embodiments, the molar ratio of ionizable lipid to the neutral lipid ranges from about 2:1 to about 8:1 (e.g., about 2:1, 3:1, 4:1, 5:1, 6:1, 7:1, or 8:1).

[0368] In some embodiments, the lipid nanoparticles do not comprise any phospholipids.

[0369] In some aspects, the lipid nanoparticle can further comprise a component, such as a sterol, to provide membrane integrity. One exemplary sterol that can be used in the lipid nanoparticle is cholesterol and derivatives thereof. Non-limiting examples of cholesterol derivatives include polar analogues such as 5a-choiestanol, 53-coprostanol, choiesteryl-(2′-hydroxy)-ethyl ether, choiesteryl-(4′-hydroxy)-butyl ether, and 6-ketocholestanol; non-polar analogues such as 5a-cholestane, cholestenone, 5a-cholestanone, 5p-cholestanone, and cholesteryl decanoate; and mixtures thereof. In some embodiments, the cholesterol derivative is a polar analogue, e.g., choiesteryl-(4′-hydroxy)-butyl ether. Exemplary cholesterol derivatives are described in PCT publication WO2009/127060 and US patent publication US2010/0130588, each of which is incorporated herein by reference in its entirety.

[0370] In some embodiments, the component providing membrane integrity, such as a sterol, can comprise 0-50% (mol) (e.g., 0-10%, 10-20%, 20-30%, 30-40%, or 40-50%) of the total lipid present in the lipid nanoparticle. In some embodiments, such a component is 20-50% (mol) 30-40% (mol) of the total lipid content of the lipid nanoparticle.

[0371] In some embodiments, the lipid nanoparticle can comprise a polyethylene glycol (PEG) or a conjugated lipid molecule. Generally, these are used to inhibit aggregation of lipid nanoparticles and/or provide steric stabilization. Exemplary conjugated lipids include, but are not limited to, PEG-lipid conjugates, polyoxazoline (POZ)-lipid conjugates, polyamide-lipid conjugates (such as ATTA-lipid conjugates), cationic-polymer lipid (CPL) conjugates, and mixtures thereof. In some embodiments, the conjugated lipid molecule is a PEG-lipid conjugate, for example, a (methoxy polyethylene glycol)-conjugated lipid.

[0372] Exemplary PEG-lipid conjugates include, but are not limited to, PEG-diacylglycerol (DAG) (such as 1-(monomethoxy-polyethyleneglycol)-2,3-dimyristoylglycerol (PEG-DMG)), PEG-dialkyloxypropyl (DAA), PEG-phospholipid, PEG-ceramide (Cer), a pegylated phosphatidylethanoloamine (PEG-PE), PEG succinate diacylglycerol (PEGS-DAG) (such as 4-0-(2′,3′-di(tetradecanoyloxy)propyl-l-0-(w-methoxy(polyethoxy)ethyl) butanedioate (PEG-S-DMG)), PEG dialkoxypropylcarbam, N-(carbonyl-methoxypolyethylene glycol 2000)-1,2-distearoyl-sn-glycero-3-phosphoethanolamine sodium salt, 1,2-dimyristoyl-sn-glycerol, methoxypoly ethylene glycol (DMG-PEG-2K), or a mixture thereof. Additional exemplary PEG-lipid conjugates are described, for example, in U.S. Pat. Nos. 5,885,613, 6,287,591, US2003/0077829, US2003/0077829, US2005/0175682, US2008/0020058, US2011/0117125, US2010/0130588, US2016/0376224, US2017/0119904, and US/099823, the contents of all of which are incorporated herein by reference in their entirety. In some embodiments, a PEG-lipid is a compound of Formula III, III-a-I, III-a-2, III-b-1, III-b-2, or V of US2018/0028664, the content of which is incorporated herein by reference in its entirety. In some embodiments, a PEG-lipid is of Formula II of US20150376115 or US2016/0376224, the content of both of which is incorporated herein by reference in its entirety. In some embodiments, the PEG-DAA conjugate can be, for example, PEG-dilauryloxypropyl, PEG-dimyristyloxypropyl, PEG-dipalmityloxypropyl, or PEG-distearyloxypropyl. The PEG-lipid can be one or more of PEG-DMG, PEG-dilaurylglycerol, PEG-dipalmitoylglycerol, PEG-disterylglycerol, PEG-dilaurylglycamide, PEG-dimyristylglycamide, PEG-dipalmitoylglycamide, PEG-disterylglycamide, PEG-cholesterol (1-[8′-(Cholest-5-en-3[beta]-oxy)carboxamido-3′,6′-dioxaoctanyl] carbamoyl-[omega]-methyl-poly(ethylene glycol), PEG-DMB (3,4-Ditetradecoxylbenzyl-[omega]-methyl-poly(ethylene glycol) ether), and 1,2-dimyristoyl-sn-glycero-3-phosphoethanolamine-N-[methoxy(polyethylene glycol)-2000]. In some embodiments, the PEG-lipid comprises PEG-DMG, 1,2-dimyristoyl-sn-glycero-3-phosphoethanolamine-N-[methoxy(polyethylene glycol)-2000]. In some embodiments, the PEG-lipid comprises a structure selected from:

[chemical structure]

[0373] In some embodiments, lipids conjugated with a molecule other than a PEG can also be used in place of PEG-lipid. For example, polyoxazoline (POZ)-lipid conjugates, polyamide-lipid conjugates (such as ATTA-lipid conjugates), and cationic-polymer lipid (GPL) conjugates can be used in place of or in addition to the PEG-lipid.

[0374] Exemplary conjugated lipids, i.e., PEG-lipids, (POZ)-lipid conjugates, ATTA-lipid conjugates and cationic polymer-lipids are described in the PCT and LIS patent applications listed in Table 2 of WO2019051289A9 and in WO2020106946A1 the contents of all of which are incorporated herein by reference in their entirety.

[0375] In some embodiments an LNP comprises a compound of Formula (xix), a compound of Formula (xxi) and a compound of Formula (xxv). In some embodiments a LNP comprising a formulation of Formula (xix), Formula (xxi) and Formula (xxv) is used to deliver a GeneWriter composition described herein to the lung or pulmonary cells.

[0376] In some embodiments, the PEG or the conjugated lipid can comprise 0-20% (mol) of the total lipid present in the lipid nanoparticle. In some embodiments, PEG or the conjugated lipid content is 0.5-10% or 2-5% (mol) of the total lipid present in the lipid nanoparticle. Molar ratios of the ionizable lipid, non-cationic-lipid, sterol, and PEG/conjugated lipid can be varied as needed. For example, the lipid particle can comprise 30-70% ionizable lipid by mole or by total weight of the composition, 0-60% cholesterol by mole or by total weight of the composition, 0-30% non-cationic-lipid by mole or by total weight of the composition and 1-10% conjugated lipid by mole or by total weight of the composition. Preferably, the composition comprises 30-40% ionizable lipid by mole or by total weight of the composition, 40-50% cholesterol by mole or by total weight of the composition, and 10-20% non-cationic-lipid by mole or by total weight of the composition. In some other embodiments, the composition is 50-75% ionizable lipid by mole or by total weight of the composition, 20-40% cholesterol by mole or by total weight of the composition, and 5 to 10% non-cationic-lipid, by mole or by total weight of the composition and 1-10% conjugated lipid by mole or by total weight of the composition. The composition may contain 60-70% ionizable lipid by mole or by total weight of the composition, 25-35% cholesterol by mole or by total weight of the composition, and 5-10% non-cationic-lipid by mole or by total weight of the composition. The composition may also contain up to 90% ionizable lipid by mole or by total weight of the composition and 2 to 15% non-cationic lipid by mole or by total weight of the composition. The formulation may also be a lipid nanoparticle formulation, for example comprising 8-30% ionizable lipid by mole or by total weight of the composition, 5-30% non-cationic lipid by mole or by total weight of the composition, and 0-20% cholesterol by mole or by total weight of the composition; 4-25% ionizable lipid by mole or by total weight of the composition, 4-25% non-cationic lipid by mole or by total weight of the composition, 2 to 25% cholesterol by mole or by total weight of the composition, 10 to 35% conjugate lipid by mole or by total weight of the composition, and 5% cholesterol by mole or by total weight of the composition; or 2-30% ionizable lipid by mole or by total weight of the composition, 2-30% non-cationic lipid by mole or by total weight of the composition, 1 to 15% cholesterol by mole or by total weight of the composition, 2 to 35% conjugate lipid by mole or by total weight of the composition, and 1-20% cholesterol by mole or by total weight of the composition; or even up to 90% ionizable lipid by mole or by total weight of the composition and 2-10% non-cationic lipids by mole or by total weight of the composition, or even 100% cationic lipid by mole or by total weight of the composition. In some embodiments, the lipid particle formulation comprises ionizable lipid, phospholipid, cholesterol and a PEG-ylated lipid in a molar ratio of 50:10:38.5:1.5. In some other embodiments, the lipid particle formulation comprises ionizable lipid, cholesterol and a PEG-ylated lipid in a molar ratio of 60:38.5:1.5.

[0377] In some embodiments, the lipid particle comprises ionizable lipid, non-cationic lipid (e.g. phospholipid), a sterol (e.g., cholesterol) and a PEG-ylated lipid, where the molar ratio of lipids ranges from 20 to 70 mole percent for the ionizable lipid, with a target of 40-60, the mole percent of non-cationic lipid ranges from 0 to 30, with a target of 0 to 15, the mole percent of sterol ranges from 20 to 70, with a target of 30 to 50, and the mole percent of PEG-ylated lipid ranges from 1 to 6, with a target of 2 to 5.

[0378] In some embodiments, the lipid particle comprises ionizable lipid/non-cationic-lipid/sterol/conjugated lipid at a molar ratio of 50:10:38.5:1.5.

[0379] In an aspect, the disclosure provides a lipid nanoparticle formulation comprising phospholipids, lecithin, phosphatidylcholine and phosphatidylethanolamine.

[0380] In some embodiments, one or more additional compounds can also be included. Those compounds can be administered separately or the additional compounds can be included in the lipid nanoparticles of the invention. In other words, the lipid nanoparticles can contain other compounds in addition to the nucleic acid or at least a second nucleic acid, different than the first. Without limitations, other additional compounds can be selected from the group consisting of small or large organic or inorganic molecules, monosaccharides, disaccharides, trisaccharides, oligosaccharides, polysaccharides, peptides, proteins, peptide analogs and derivatives thereof, peptidomimetics, nucleic acids, nucleic acid analogs and derivatives, an extract made from biological materials, or any combinations thereof.

[0381] In some embodiments, a lipid nanoparticle (or a formulation comprising lipid nanoparticles) lacks reactive impurities (e.g., aldehydes or ketones), or comprises less than a preselected level of reactive impurities (e.g., aldehydes or ketones). While not wishing to be bound by theory, in some embodiments, a lipid reagent is used to make a lipid nanoparticle formulation, and the lipid reagent may comprise a contaminating reactive impurity (e.g., an aldehyde or ketone). A lipid regent may be selected for manufacturing based on having less than a preselected level of reactive impurities (e.g., aldehydes or ketones). Without wishing to be bound by theory, in some embodiments, aldehydes can cause modification and damage of RNA, e.g., cross-linking between bases and/or covalently conjugating lipid to RNA (e.g., forming lipid-RNA adducts). This may, in some instances, lead to failure of a reverse transcriptase reaction and/or incorporation of inappropriate bases, e.g., at the site(s) of lesion(s), e.g., a mutation in a newly synthesized target DNA.

[0382] In some embodiments, a lipid nanoparticle formulation is produced using a lipid reagent comprising less than 5%, 4%, 3%, 2%, 1%, 0.9%, 0.8%, 0.7%, 0.6%, 0.5%, 0.4%, 0.3%, 0.2%, or 0.1% total reactive impurity (e.g., aldehyde) content. In some embodiments, a lipid nanoparticle formulation is produced using a lipid reagent comprising less than 5%, 4%, 3%, 2%, 1%, 0.9%, 0.8%, 0.7%, 0.6%, 0.5%, 0.4%, 0.3%, 0.2%, or 0.1% of any single reactive impurity (e.g., aldehyde) species. In some embodiments, a lipid nanoparticle formulation is produced using a lipid reagent comprising: (i) less than 5%, 4%, 3%, 2%, 1%, 0.9%, 0.8%, 0.7%, 0.6%, 0.5%, 0.4%, 0.3%, 0.2%, or 0.1% total reactive impurity (e.g., aldehyde) content; and (ii) less than 5%, 4%, 3%, 2%, 1%, 0.9%, 0.8%, 0.7%, 0.6%, 0.5%, 0.4%, 0.3%, 0.2%, or 0.1% of any single reactive impurity (e.g., aldehyde) species. In some embodiments, the lipid nanoparticle formulation is produced using a plurality of lipid reagents, and each lipid reagent of the plurality independently meets one or more criterion described in this paragraph. In some embodiments, each lipid reagent of the plurality meets the same criterion, e.g., a criterion of this paragraph.

[0383] In some embodiments, the lipid nanoparticle formulation comprises less than 5%, 4%, 3%, 2%, 1%, 0.9%, 0.8%, 0.7%, 0.6%, 0.5%, 0.4%, 0.3%, 0.2%, or 0.1% total reactive impurity (e.g., aldehyde) content. In some embodiments, the lipid nanoparticle formulation comprises less than 5%, 4%, 3%, 2%, 1%, 0.9%, 0.8%, 0.7%, 0.6%, 0.5%, 0.4%, 0.3%, 0.2%, or 0.1% of any single reactive impurity (e.g., aldehyde) species. In some embodiments, the lipid nanoparticle formulation comprises: (i) less than 5%, 4%, 3%, 2%, 1%, 0.9%, 0.8%, 0.7%, 0.6%, 0.5%, 0.4%, 0.3%, 0.2%, or 0.1% total reactive impurity (e.g., aldehyde) content; and (ii) less than 5%, 4%, 3%, 2%, 1%, 0.9%, 0.8%, 0.7%, 0.6%, 0.5%, 0.4%, 0.3%, 0.2%, or 0.1% of any single reactive impurity (e.g., aldehyde) species.

[0384] In some embodiments, one or more, or optionally all, of the lipid reagents used for a lipid nanoparticle as described herein or a formulation thereof comprise less than 5%, 4%, 3%, 2%, 1%, 0.9%, 0.8%, 0.7%, 0.6%, 0.5%, 0.4%, 0.3%, 0.2%, or 0.1% total reactive impurity (e.g., aldehyde) content. In some embodiments, one or more, or optionally all, of the lipid reagents used for a lipid nanoparticle as described herein or a formulation thereof comprise less than 5%, 4%, 3%, 2%, 1%, 0.9%, 0.8%, 0.7%, 0.6%, 0.5%, 0.4%, 0.3%, 0.2%, or 0.1% of any single reactive impurity (e.g., aldehyde) species. In some embodiments, one or more, or optionally all, of the lipid reagents used for a lipid nanoparticle as described herein or a formulation thereof comprise: (i) less than 5%, 4%, 3%, 2%, 1%, 0.9%, 0.8%, 0.7%, 0.6%, 0.5%, 0.4%, 0.3%, 0.2%, or 0.1% total reactive impurity (e.g., aldehyde) content; and (ii) less than 5%, 4%, 3%, 2%, 1%, 0.9%, 0.8%, 0.7%, 0.6%, 0.5%, 0.4%, 0.3%, 0.2%, or 0.1% of any single reactive impurity (e.g., aldehyde) species.

[0385] In some embodiments, total aldehyde content and/or quantity of any single reactive impurity (e.g., aldehyde) species is determined by liquid chromatography (LC), e.g., coupled with tandem mass spectrometry (MS/MS), e.g., according to the method described in Example 34. In some embodiments, reactive impurity (e.g., aldehyde) content and/or quantity of reactive impurity (e.g., aldehyde) species is determined by detecting one or more chemical modifications of a nucleic acid molecule (e.g., an RNA molecule, e.g., as described herein) associated with the presence of reactive impurities (e.g., aldehydes), e.g., in the lipid reagents. In some embodiments, reactive impurity (e.g., aldehyde) content and/or quantity of reactive impurity (e.g., aldehyde) species is determined by detecting one or more chemical modifications of a nucleotide or nucleoside (e.g., a ribonucleotide or ribonucleoside, e.g., comprised in or isolated from a template nucleic acid, e.g., as described herein) associated with the presence of reactive impurities (e.g., aldehydes), e.g., in the lipid reagents, e.g., as described in Example 35. In embodiments, chemical modifications of a nucleic acid molecule, nucleotide, or nucleoside are detected by determining the presence of one or more modified nucleotides or nucleosides, e.g., using LC-MS/MS analysis, e.g., as described in Example 35.

[0386] In some embodiments, a nucleic acid (e.g., RNA) described herein (e.g., a template nucleic acid or a nucleic acid encoding a GeneWriter) does not comprise an aldehyde modification, or comprises less than a preselected amount of aldehyde modifications. In some embodiments, on average, a nucleic acid has less than 50, 20, 10, 5, 2, or 1 aldehyde modifications per 1000 nucleotides, e.g., wherein a single cross-linking of two nucleotides is a single aldehyde modification. In some embodiments, the aldehyde modification is an RNA adduct (e.g., a lipid-RNA adduct). In some embodiments, the aldehyde-modified nucleotide is cross-linking between bases. In some embodiments, a nucleic acid (e.g., RNA) described herein comprises less than 50, 20, 10, 5, 2, or 1 cross-links between nucleotide.

[0387] In some embodiments, LNPs are directed to specific tissues by the addition of targeting domains. For example, biological ligands may be displayed on the surface of LNPs to enhance interaction with cells displaying cognate receptors, thus driving association with and cargo delivery to tissues wherein cells express the receptor. In some embodiments, the biological ligand may be a ligand that drives delivery to the liver, e.g., LNPs that display GalNAc result in delivery of nucleic acid cargo to hepatocytes that display asialoglycoprotein receptor (ASGPR). The work of Akinc et al. Mol Ther 18(7):1357-1364 (2010) teaches the conjugation of a trivalent GalNAc ligand to a PEG-lipid (GalNAc-PEG-DSG) to yield LNPs dependent on ASGPR for observable LNP cargo effect (see, e.g., FIG. 6). Other ligand-displaying LNP formulations, e.g., incorporating folate, transferrin, or antibodies, are discussed in WO2017223135, which is incorporated herein by reference in its entirety, in addition to the references used therein, namely Kolhatkar et al., Curr Drug Discov Technol. 2011 8:197-206; Musacchio and Torchilin, Front Biosci. 2011 16:1388-1412; Yu et al., Mol Membr Biol. 2010 27:286-298; Patil et al., Crit Rev Ther Drug Carrier Syst. 2008 25:1-61; Benoit et al., Biomacromolecules. 2011 12:2708-2714; Zhao et al., Expert Opin Drug Deliv. 2008 5:309-319; Akinc et al., Mol Ther. 2010 18:1357-1364; Srinivasan et al., Methods Mol Biol. 2012 820:105-116; Ben-Arie et al., Methods Mol Biol. 2012 757:497-507; Peer 2010 J Control Release. 20:63-68; Peer et al., Proc Natl Acad Sci USA. 2007 104:4095-4100; Kim et al., Methods Mol Biol. 2011 721:339-353; Subramanya et al., Mol Ther. 2010 18:2028-2037; Song et al., Nat Biotechnol. 2005 23:709-717; Peer et al., Science. 2008 319:627-630; and Peer and Lieberman, Gene Ther. 2011 18:1127-1133.

[0388] In some embodiments, LNPs are selected for tissue-specific activity by the addition of a Selective ORgan Targeting (SORT) molecule to a formulation comprising traditional components, such as ionizable cationic lipids, amphipathic phospholipids, cholesterol and poly(ethylene glycol) (PEG) lipids. The teachings of Cheng et al. Nat Nanotechnol 15(4):313-320 (2020) demonstrate that the addition of a supplemental “SORT” component precisely alters the in vivo RNA delivery profile and mediates tissue-specific (e.g., lungs, liver, spleen) gene delivery and editing as a function of the percentage and biophysical property of the SORT molecule.

[0389] In some embodiments, the LNPs comprise biodegradable, ionizable lipids. In some embodiments, the LNPs comprise (9Z,12Z)-3-((4,4-bis(octyloxy)butanoyl)oxy)-2-((((3-(diethylamino)propoxy)carbonyl)oxy)methyl)propyl octadeca-9,12-dienoate, also called 3-((4,4-bis(octyloxy)butanoyl)oxy)-2-((((3-(diethylamino)propoxy)carbonyl)oxy)methyl)propyl (9Z,12Z)-octadeca-9,12-dienoate) or another ionizable lipid. See, e.g, lipids of WO2019/067992, WO/2017/173054, WO2015/095340, and WO2014/136086, as well as references provided therein. In some embodiments, the term cationic and ionizable in the context of LNP lipids is interchangeable, e.g., wherein ionizable lipids are cationic depending on the pH.

[0390] In some embodiments, multiple components of a Gene Writer system may be prepared as a single LNP formulation, e.g., an LNP formulation comprises mRNA encoding for the Gene Writer polypeptide and an RNA template. Ratios of nucleic acid components may be varied in order to maximize the properties of a therapeutic. In some embodiments, the ratio of RNA template to mRNA encoding a Gene Writer polypeptide is about 1:1 to 100:1, e.g., about 1:1 to 20:1, about 20:1 to 40:1, about 40:1 to 60:1, about 60:1 to 80:1, or about 80:1 to 100:1, by molar ratio. In other embodiments, a system of multiple nucleic acids may be prepared by separate formulations, e.g., one LNP formulation comprising a template RNA and a second LNP formulation comprising an mRNA encoding a Gene Writer polypeptide. In some embodiments, the system may comprise more than two nucleic acid components formulated into LNPs. In some embodiments, the system may comprise a protein, e.g., a Gene Writer polypeptide, and a template RNA formulated into at least one LNP formulation.

[0391] In some embodiments, the average LNP diameter of the LNP formulation may be between 10s of nm and 100s of nm, e.g., measured by dynamic light scattering (DLS). In some embodiments, the average LNP diameter of the LNP formulation may be from about 40 nm to about 150 nm, such as about 40 nm, 45 nm, 50 nm, 55 nm, 60 nm, 65 nm, 70 nm, 75 nm, 80 nm, 85 nm, 90 nm, 95 nm, 100 nm, 105 nm, 110 nm, 115 nm, 120 nm, 125 nm, 130 nm, 135 nm, 140 nm, 145 nm, or 150 nm. In some embodiments, the average LNP diameter of the LNP formulation may be from about 50 nm to about 100 nm, from about 50 nm to about 90 nm, from about 50 nm to about 80 nm, from about 50 nm to about 70 nm, from about 50 nm to about 60 nm, from about 60 nm to about 100 nm, from about 60 nm to about 90 nm, from about 60 nm to about 80 nm, from about 60 nm to about 70 nm, from about 70 nm to about 100 nm, from about 70 nm to about 90 nm, from about 70 nm to about 80 nm, from about 80 nm to about 100 nm, from about 80 nm to about 90 nm, or from about 90 nm to about 100 nm. In some embodiments, the average LNP diameter of the LNP formulation may be from about 70 nm to about 100 nm. In a particular embodiment, the average LNP diameter of the LNP formulation may be about 80 nm. In some embodiments, the average LNP diameter of the LNP formulation may be about 100 nm. In some embodiments, the average LNP diameter of the LNP formulation ranges from about 1 mm to about 500 mm, from about 5 mm to about 200 mm, from about 10 mm to about 100 mm, from about 20 mm to about 80 mm, from about 25 mm to about 60 mm, from about 30 mm to about 55 mm, from about 35 mm to about 50 mm, or from about 38 mm to about 42 mm.

[0392] A LNP may, in some instances, be relatively homogenous. A polydispersity index may be used to indicate the homogeneity of a LNP, e.g., the particle size distribution of the lipid nanoparticles. A small (e.g., less than 0.3) polydispersity index generally indicates a narrow particle size distribution. A LNP may have a polydispersity index from about 0 to about 0.25, such as 0.01, 0.02, 0.03, 0.04, 0.05, 0.06, 0.07, 0.08, 0.09, 0.10, 0.11, 0.12, 0.13, 0.14, 0.15, 0.16, 0.17, 0.18, 0.19, 0.20, 0.21, 0.22, 0.23, 0.24, or 0.25. In some embodiments, the polydispersity index of a LNP may be from about 0.10 to about 0.20.

[0393] The zeta potential of a LNP may be used to indicate the electrokinetic potential of the composition. In some embodiments, the zeta potential may describe the surface charge of a LNP. Lipid nanoparticles with relatively low charges, positive or negative, are generally desirable, as more highly charged species may interact undesirably with cells, tissues, and other elements in the body. In some embodiments, the zeta potential of a LNP may be from about −10 mV to about +20 mV, from about −10 mV to about +15 mV, from about −10 mV to about +10 mV, from about −10 mV to about +5 mV, from about −10 mV to about 0 mV, from about −10 mV to about −5 mV, from about −5 mV to about +20 mV, from about −5 mV to about +15 mV, from about −5 mV to about +10 mV, from about −5 mV to about +5 mV, from about −5 mV to about 0 mV, from about 0 mV to about +20 mV, from about 0 mV to about +15 mV, from about 0 mV to about +10 mV, from about 0 mV to about +5 mV, from about +5 mV to about +20 mV, from about +5 mV to about +15 mV, or from about +5 mV to about +10 mV.

[0394] The efficiency of encapsulation of a protein and/or nucleic acid, e.g., Gene Writer polypeptide or mRNA encoding the polypeptide, describes the amount of protein and/or nucleic acid that is encapsulated or otherwise associated with a LNP after preparation, relative to the initial amount provided. The encapsulation efficiency is desirably high (e.g., close to 100%). The encapsulation efficiency may be measured, for example, by comparing the amount of protein or nucleic acid in a solution containing the lipid nanoparticle before and after breaking up the lipid nanoparticle with one or more organic solvents or detergents. An anion exchange resin may be used to measure the amount of free protein or nucleic acid (e.g., RNA) in a solution. Fluorescence may be used to measure the amount of free protein and/or nucleic acid (e.g., RNA) in a solution. For the lipid nanoparticles described herein, the encapsulation efficiency of a protein and/or nucleic acid may be at least 50%, for example 50%, 55%, 60%, 65%, 70%, 75%, 80%, 85%, 90%, 91%, 92%, 93%, 94%, 95%, 96%, 97%, 98%, 99%, or 100%. In some embodiments, the encapsulation efficiency may be at least 80%. In some embodiments, the encapsulation efficiency may be at least 90%. In some embodiments, the encapsulation efficiency may be at least 95%.

[0395] A LNP may optionally comprise one or more coatings. In some embodiments, a LNP may be formulated in a capsule, film, or table having a coating. A capsule, film, or tablet including a composition described herein may have any useful size, tensile strength, hardness or density.

[0396] Additional exemplary lipids, formulations, methods, and characterization of LNPs are taught by WO2020061457, which is incorporated herein by reference in its entirety.

[0397] In some embodiments, in vitro or ex vivo cell lipofections are performed using Lipofectamine MessengerMax (Thermo Fisher) or TransIT-mRNA Transfection Reagent (Mirus Bio). In certain embodiments, LNPs are formulated using the GenVoy_ILM ionizable lipid mix (Precision NanoSystems). In certain embodiments, LNPs are formulated using 2,2-dilinoleyl-4-dimethylaminoethyl-[1,3]-dioxolane (DLin-KC2-DMA) or dilinoleylmethyl-4-dimethylaminobutyrate (DLin-MC3-DMA or MC3), the formulation and in vivo use of which are taught in Jayaraman et al. Angew Chem Int Ed Engl 51(34):8529-8533 (2012), incorporated herein by reference in its entirety.

[0398] LNP formulations optimized for the delivery of CRISPR-Cas systems, e.g., Cas9-gRNA RNP, gRNA, Cas9 mRNA, are described in WO2019067992 and WO2019067910, both incorporated by reference.

[0399] Additional specific LNP formulations useful for delivery of nucleic acids are described in U.S. Pat. Nos. 8,158,601 and 8,168,775, both incorporated by reference, which include formulations used in patisiran, sold under the name ONPATTRO.

[0400] Exemplary dosing of Gene Writer LNP may include about 0.1, 0.25, 0.3, 0.5, 1, 2, 3, 4, 5, 6, 8, 10, or 100 mg/kg (RNA). Exemplary dosing of AAV comprising a nucleic acid encoding one or more components of the system may include an MOI of about 10¹¹, 10¹², 10¹³, and 1014 vg/kg.

### Template RNA Component of Gene Writer™ Gene Editor System

[0401] The Gene Writer systems described herein can transcribe an RNA sequence template into host target DNA sites by target-primed reverse transcription. By writing DNA sequence(s) via reverse transcription of the RNA sequence template directly into the host genome, the Gene Writer system can insert an object sequence into a target genome without the need for exogenous DNA sequences to be introduced into the host cell (unlike, for example, CRISPR systems), as well as eliminate an exogenous DNA insertion step. Therefore, the Gene Writer system provides a platform for the use of customized RNA sequence templates containing object sequences, e.g., sequences comprising heterologous gene coding and/or function information.

[0402] For the purposes of description of the template RNA component of the Gene Writer system, the template RNA can be envisioned as comprising modular parts (FIGS. 18-19). A Gene Writer template may comprise all or some of the illustrated parts and modules can be combined, re-arranged, and/or left out. The illustrated modules are not intended to be limiting to potential elements included in the template and additional components can be readily envisioned, e.g., 5′ and 3′ terminal domains to improve template stability.

TABLE 4
The modules comprising a typical Gene Writer RNA template.
A = 5′ homology arm; B = Ribozyme; C = 5′ UTR; D = heterologous object
sequence; E = 3′ UTR; F = 3′ homology arm

| Module | Function |
|---|---|
| A: 5′ homology arm | The 5′ homology arm module is complementary to the DNA |
| | sequence 5′ to where the Gene Writer system nicks target DNA. |
| B: Ribozyme | The ribozyme module is a component of the 5′ UTR sequence of |
| | an endogenous retrotransposon, at the 5′ end of the 5′ UTR |
| | (Ruminski, D. J., et al, Journal of Biological Chemistry, 286(48), |
| | 41286-41295, 2011). |
| C: 5′ UTR | The 5′ UTR module is an RNA sequence or interacting moiety |
| | with which the Gene Writer polypeptide interacts and may be |
| | involved in the process of retrotransposition. |
| D: Heterologous object | The heterologous object sequence is an RNA sequence that |
| sequence | serves as the template for the Gene Writer polypeptide to insert a |
| | desired payload into the targeted genomic location. |
| E: 3′ UTR | The 3′ UTR module is an RNA sequence or any other interacting |
| | moiety that the Gene Writer polypeptide interacts with to bind to |
| | the template RNA molecule and may be involved in the process |
| | of retrotransposition. |
| F: 3′ homology arm | The 3′ homology arm module is complementary to the DNA |
| | sequence 3′ to where the Gene Writer system nicks target DNA |

[0403] In some embodiments the template RNA encodes a Gene Writer protein in cis with a heterologous object sequence. Various cis constructs were described, for example, in Kuroki-Kami et al (2019) Mobile DNA 10:23 (incorporated by reference herein in its entirety), and can be used in combination with any of the embodiments described herein. For instance, in some embodiments, the template RNA comprises a heterologous object sequence, a sequence encoding a Gene Writer protein (e.g., a protein comprising (i) a reverse transcriptase domain and (ii) an endonuclease domain, e.g., as described herein), a 5′ untranslated region, and a 3′ untranslated region. The components may be included in various orders. In some embodiments, the Gene Writer protein and heterologous object sequence are encoded in different directions (sense vs. anti-sense), e.g., using an arrangement shown in FIG. 3A of Kuroki-Kami et al, Id. In some embodiments the Gene Writer protein and heterologous object sequence are encoded in the same direction. In some embodiments, the nucleic acid encoding the polypeptide and the template RNA or the nucleic acid encoding the template RNA are covalently linked, e.g., are part of a fusion nucleic acid and/or are part of the same transcript. In some embodiments, the fusion nucleic acid comprises RNA or DNA.

[0404] The nucleic acid encoding the Gene Writer polypeptide may, in some instances, be 5′ of the heterologous object sequence. For example, in some embodiments, the template RNA comprises, from 5′ to 3′, a 5′ untranslated region, a sense-encoded Gene Writer polypeptide, a sense-encoded heterologous object sequence, and 3′ untranslated region. In some embodiments, the template RNA comprises, from 5′ to 3′, a 5′ untranslated region, a sense-encoded Gene Writer polypeptide, anti-sense-encoded heterologous object sequence, and 3′ untranslated region.

[0405] In some embodiments, the RNA further comprises homology to the DNA target site.

[0406] It is understood that, when a template RNA is described as comprising an open reading frame or the reverse complement thereof, in some embodiments the template RNA must be converted into double stranded DNA (e.g., through reverse transcription) before the open reading frame can be transcribed and translated.

[0407] In certain embodiments, customized RNA sequence template can be identified, designed, engineered and constructed to contain sequences altering or specifying host genome function, for example by introducing a heterologous coding region into a genome; affecting or causing exon structure/alternative splicing; causing disruption of an endogenous gene; causing transcriptional activation of an endogenous gene; causing epigenetic regulation of an endogenous DNA; causing up- or down-regulation of operably liked genes, etc. In certain embodiments, a customized RNA sequence template can be engineered to contain sequences coding for exons and/or transgenes, provide for binding sites to transcription factor activators, repressors, enhancers, etc., and combinations of thereof. In other embodiments, the coding sequence can be further customized with splice acceptor sites, poly-A tails. In certain embodiments the RNA sequence can contain sequences coding for an RNA sequence template homologous to the RLE transposase, be engineered to contain heterologous coding sequences, or combinations thereof.

[0408] The template RNA may have some homology to the target DNA. In some embodiments the template RNA has at least 2, 3, 4, 5, 6, 7, 8, 9, 10, 11, 12, 13, 14, 15, 20, 25, 30, 35, 40, 45, 50, 60, 70, 80, 90, 100, 110, 120, 130, 140, 150, 175, 200 or more bases of exact homology to the target DNA at the 3′ end of the RNA. In some embodiments the template RNA has at least 2, 3, 4, 5, 6, 7, 8, 9, 10, 11, 12, 13, 14, 15, 20, 25, 30, 35, 40, 45, 50, 60, 70, 80, 90, 100, 110, 120, 130, 140, 150, 160, 175, 180, or 200 or more bases of at least 50%, 60%, 70%, 80%, 85%, 90%, 95%, 97%, 98%, 99% or 100% homology to the target DNA, e.g., at the 5′ end of the template RNA. In some embodiments the template RNA has a 3′ untranslated region derived from a non-LTR retrotransposon, e.g. a non-LTR retrotransposons described herein. In some embodiments the template RNA has a 3′ region of at least 10, 15, 20, 25, 30, 40, 50, 60, 80, 100, 120, 140, 160, 180, 200 or more bases of at least 50%, 60%, 70%, 80%, 85%, 90%, 95%, 97%, 98%, 99% or 100% homology to the 3′ sequence of a non-LTR retrotransposon, e.g., a non-LTR retrotransposon described herein, e.g. a non-LTR retrotransposon in Table 1, 2, or 3. In some embodiments the template RNA has a 5′ untranslated region derived from a non-LTR retrotransposon, e.g. a non-LTR retrotransposons described herein. In some embodiments the template RNA has a 5′ region of at least 10, 15, 20, 25, 30, 40, 50, 60, 80, 100, 120, 140, 160, 180, or 200 or more bases of at least 40%, 50%, 60%, 70%, 80%, 90%, 95% or greater homology to the 5′ sequence of a non-LTR retrotransposon, e.g., a non-LTR retrotransposon described herein, e.g. a non-LTR retrotransposon described in Table 2 or 3.

[0409] The template RNA component of a Gene Writer genome editing system described herein typically is able to bind the Gene Writer genome editing protein of the system. In some embodiments the template RNA has a 3′ region that is capable of binding a Gene Writer genome editing protein. The binding region, e.g., 3′ region, may be a structured RNA region, e.g., having at least 1, 2 or 3 hairpin loops, capable of binding the Gene Writer genome editing protein of the system.

[0410] The template RNA component of a Gene Writer genome editing system described herein typically is able to bind the Gene Writer genome editing protein of the system. In some embodiments the template RNA has a 5′ region that is capable of binding a Gene Writer genome editing protein. The binding region, e.g., 5′ region, may be a structured RNA region, e.g., having at least 1, 2 or 3 hairpin loops, capable of binding the Gene Writer genome editing protein of the system. In some embodiments, the 5′ untranslated region comprises a pseudoknot, e.g., a pseudoknot that is capable of binding to the Gene Writer protein.

[0411] In some embodiments, the template RNA (e.g., an untranslated region of the hairpin RNA, e.g., a 5′ untranslated region) comprises a stem-loop sequence. In some embodiments, the template RNA (e.g., an untranslated region of the hairpin RNA, e.g., a 5′ untranslated region) comprises a hairpin. In some embodiments, the template RNA (e.g., an untranslated region of the hairpin RNA, e.g., a 5′ untranslated region) comprises a helix. In some embodiments, the template RNA (e.g., an untranslated region of the hairpin RNA, e.g., a 5′ untranslated region) comprises a psuedoknot. In some embodiments the template RNA comprises a ribozyme. In some embodiments the ribozyme is similar to an hepatitis delta virus (HDV) ribozyme, e.g., has a secondary structure like that of the HDV ribozyme and/or has one or more activities of the HDV ribozyme, e.g., a self-cleavage activity. See, e.g., Eickbush et al., Molecular and Cellular Biology, 2010, 3142-3150.

[0412] In some embodiments, the template RNA (e.g., an untranslated region of the hairpin RNA, e.g., a 3′ untranslated region) comprises one or more stem-loops or helices. Exemplary structures of R2 3′ UTRs are shown, for example, in Ruschak et al. “Secondary structure models of the 3′ untranslated regions of diverse R2 RNAs” RNA. 2004 June; 10(6): 978-987, e.g., at FIG. 3, therein, and in Eikbush and Eikbush, “R2 and R2/R1 hybrid non-autonomous retrotransposons derived by internal deletions of full-length elements” Mobile DNA (2012) 3:10; e.g., at FIG. 3 therein, which articles are hereby incorporated by reference in their entirety.

[0413] In some embodiments, a template RNA described herein comprises a sequence that is capable of binding to a GeneWriter protein described herein. For instance, in some embodiments, the template RNA comprises an MS2 RNA sequence capable of binding to an MS2 coat protein sequence in the GeneWriter protein. In some embodiments, the template RNA comprises an RNA sequence capable of binding to a B-box sequence. In some embodiments, the template RNA comprises an RNA sequence (e.g., a crRNA sequence and/or tracrRNA sequence) capable of binding to a dCas sequence in the GeneWriter protein. In some embodiments, in addition to or in place of a UTR, the template RNA is linked (e.g., covalently) to a non-RNA UTR, e.g., a protein or small molecule.

[0414] In some embodiments the template RNA has a poly-A tail at the 3′ end. In some embodiments the template RNA does not have a poly-A tail at the 3′ end.

[0415] In some embodiments the template RNA has a 5′ region of at least 10, 15, 20, 25, 30, 40, 50, 60, 80, 100, 120, 140, 160, 180, 200 or more bases of at least 40%, 50%, 60%, 70%, 80%, 90%, 95% or greater homology to the 5′ sequence of a non-LTR retrotransposon, e.g., a non-LTR retrotransposon described herein.

[0416] The template RNA of the system typically comprises an object sequence for insertion into a target DNA. The object sequence may be coding or non-coding.

[0417] In some embodiments a system or method described herein comprises a single template RNA. In some embodiments a system or method described herein comprises a plurality of template RNAs. In some embodiments the DNA encoding the template is circularized by the activity of enzymes, such as recombinases, to increase activity, as described in Yant el al., Nature Biotechnology 20: 990-1005, 2002.

[0418] In some embodiments, the heterologous object sequence may contain an open reading frame. In some embodiments the template RNA has a Kozak sequence. In some embodiments the template RNA has an internal ribosome entry site. In some embodiments the template RNA has a self-cleaving peptide such as a T2A or P2A site. In some embodiments the template RNA has a start codon. In some embodiments the template RNA has a splice acceptor site. In some embodiments the template RNA has a splice donor site. Exemplary splice acceptor and splice donor sites are described in WO2016044416, incorporated herein by reference in its entirety. Exemplary splice acceptor site sequences are known to those of skill in the art and include, by way of example only, CTGACCCTTCTCTCTCTCCCCCAGAG (SEQ ID NO: 1620) (from human HBB gene) and TTTCTCTCCCACAAG (SEQ ID NO: 1621) (from human immunoglobulin-gamma gene). In some embodiments the template RNA has a microRNA binding site downstream of the stop codon. In some embodiments the template RNA has a polyA tail downstream of the stop codon of an open reading frame. In some embodiments the template RNA comprises one or more exons. In some embodiments the template RNA comprises one or more introns. In some embodiments the template RNA comprises a eukaryotic transcriptional terminator. In some embodiments the template RNA comprises an enhanced translation element or a translation enhancing element. In some embodiments the RNA comprises the human T-cell leukemia virus (HTLV-1) R region. In some embodiments the RNA comprises a posttranscriptional regulatory element that enhances nuclear export, such as that of Hepatitis B Virus (HPRE) or Woodchuck Hepatitis Virus (WPRE). In some embodiments, in the template RNA, the heterologous object sequence encodes a polypeptide and is coded in an antisense direction with respect to the 5′ and 3′ UTR. In some embodiments, in the template RNA, the heterologous object sequence encodes a polypeptide and is coded in a sense direction with respect to the 5′ and 3′ UTR.

[0419] In some embodiments, a nucleic acid described herein (e.g., a template RNA or a DNA encoding a template RNA) comprises a microRNA binding site. In some embodiments, the microRNA binding site is used to increase the target-cell specificity of a GeneWriter system. For instance, the microRNA binding site can be chosen on the basis that is is recognized by a miRNA that is present in a non-target cell type, but that is not present (or is present at a reduced level relative to the non-target cell) in a target cell type. Thus, when the template RNA is present in a non-target cell, it would be bound by the miRNA, and when the template RNA is present in a target cell, it would not be bound by the miRNA (or bound but at reduced levels relative to the non-target cell). While not wishing to be bound by theory, binding of the miRNA to the template RNA may interfere with insertion of the heterologous object sequence into the genome. Accordingly, the heterologous object sequence would be inserted into the genome of target cells more efficiently than into the genome of non-target cells. A system having a microRNA binding site in the template RNA (or DNA encoding it) may also be used in combination with a nucleic acid encoding a Gene Writer polypeptide, wherein expression of the Gene Writer polypeptide is regulated by a second microRNA binding site, e.g., as described herein, e.g., in the section entitled “Polypeptide component of Gene Writer gene editor system”. In some embodiments, e.g., for liver indications, a miRNA is selected from Table 4 of WO2020014209.

[0420] In some embodiments, the object sequence may contain a non-coding sequence. For example, the template RNA may comprise a regulatory element, e.g., a promoter or enhancer sequence or miRNA binding site. In some embodiments, integration of the object sequence at a target site will result in upregulation of an endogenous gene. In some embodiments, integration of the object sequence at a target site will result in downregulation of an endogenous gene. In some embodiments the template RNA comprises a tissue specific promoter or enhancer, each of which may be unidirectional or bidirectional. In some embodiments the promoter is an RNA polymerase I promoter, RNA polymerase II promoter, or RNA polymerase III promoter. In some embodiments the promoter comprises a TATA element. In some embodiments the promoter comprises a B recognition element. In some embodiments the promoter has one or more binding sites for transcription factors. In some embodiments the non-coding sequence is transcribed in an antisense-direction with respect to the 5′ and 3′ UTR. In some the non-coding sequence is transcribed in a sense direction with respect to the 5′ and 3′ UTR.

[0421] In some embodiments, a nucleic acid described herein (e.g., a template RNA or a DNA encoding a template RNA) comprises a promoter sequence, e.g., a tissue specific promoter sequence. In some embodiments, the tissue-specific promoter is used to increase the target-cell specificity of a Gene Writer system. For instance, the promoter can be chosen on the basis that it is active in a target cell type but not active in (or active at a lower level in) a non-target cell type. Thus, even if the promoter integrated into the genome of a non-target cell, it would not drive expression (or only drive low level expression) of an integrated gene. A system having a tissue-specific promoter sequence in the template RNA may also be used in combination with a microRNA binding site, e.g., in the template RNA or a nucleic acid encoding a Gene Writer protein, e.g., as described herein. A system having a tissue-specific promoter sequence in the template RNA may also be used in combination with a DNA encoding a Gene Writer polypeptide, driven by a tissue-specific promoter, e.g., to achieve higher levels of Gene Writer protein in target cells than in non-target cells. In some embodiments, e.g., for liver indications, a tissue-specific promoter is selected from Table 3 of WO2020014209, which is hereby incorporated by reference.

[0422] In some embodiments, a Gene Writer system, e.g., DNA encoding a Gene Writer polypeptide, DNA encoding a template RNA, or DNA or RNA encoding a heterologous object sequence, is designed such that one or more elements is operably linked to a tissue-specific promoter, e.g., a promoter that is active in T-cells. In further embodiments, the T-cell active promoter is inactive in other cell types, e.g., B-cells, NK cells. In some embodiments, the T-cell active promoter is derived from a promoter for a gene encoding a component of the T-cell receptor, e.g., TRAC, TRBC, TRGC, TRDC. In some embodiments, the T-cell active promoter is derived from a promoter for a gene encoding a component of a T-cell-specific cluster of differentiation protein, e.g., CD3, e.g., CD3D, CD3E, CD3G, CD3Z. In some embodiments, T-cell-specific promoters in Gene Writer systems are discovered by comparing publicly available gene expression data across cell types and selecting promoters from the genes with enhanced expression in T-cells. In some embodiments, promoters may be selecting depending on the desired expression breadth, e.g., promoters that are active in T-cells only, promoters that are active in NK cells only, promoters that are active in both T-cells and NK cells.

[0423] In some embodiments the template RNA comprises a microRNA sequence, a siRNA sequence, a guide RNA sequence, a piwi RNA sequence.

[0424] In some embodiments the template RNA comprises a site that coordinates epigenetic modification. In some embodiments the template RNA comprises an element that inhibits, e.g., prevents, epigenetic silencing. In some embodiments the template RNA comprises a chromatin insulator. For example, the template RNA comprises a CTCF site or a site targeted for DNA methylation.

[0425] In order to promote higher level or more stable gene expression, the template RNA may include features that prevent or inhibit gene silencing. In some embodiments, these features prevent or inhibit DNA methylation. In some embodiments, these features promote DNA demethylation. In some embodiments, these features prevent or inhibit histone deacetylation. In some embodiments, these features prevent or inhibit histone methylation. In some embodiments, these features promote histone acetylation. In some embodiments, these features promote histone demethylation. In some embodiments, multiple features may be incorporated into the template RNA to promote one or more of these modifications. CpG dinculeotides are subject to methylation by host methyl transferases. In some embodiments, the template RNA is depleted of CpG dinucleotides, e.g., does not comprise CpG nucleotides or comprises a reduced number of CpG dinucleotides compared to a corresponding unaltered sequence. In some embodiments, the promoter driving transgene expression from integrated DNA is depleted of CpG dinucleotides.

[0426] In some embodiments the template RNA comprises a gene expression unit composed of at least one regulatory region operably linked to an effector sequence. The effector sequence may be a sequence that is transcribed into RNA (e.g., a coding sequence or a non-coding sequence such as a sequence encoding a micro RNA).

[0427] In some embodiments the object sequence of the template RNA is inserted into a target genome in an endogenous intron. In some embodiments the object sequence of the template RNA is inserted into a target genome and thereby acts as a new exon. In some embodiments the insertion of the object sequence into the target genome results in replacement of a natural exon or the skipping of a natural exon.

[0428] In some embodiments, the object sequence of the template RNA is inserted into the target genome in a genomic safe harbor site, such as AAVS1, CCR5, ROSA26, or the albumin locus. In some embodiments, a Gene Writer is used to integrate a CAR into the T-cell receptor α constant (TRAC) locus (Eyquem et al Nature 543, 113-117 (2017)). In some embodiments, a Gene Writer is used to integrate a CAR into a T-cell receptor β constant (TRBC) locus. Many other safe harbors have been identified by computational approaches (Pellenz et al Hum Gen Ther 30, 814-828 (2019)) and could be used for Gene Writer-mediated integration. In some embodiments, the object sequence of the template RNA is added to the genome in an intergenic or intragenic region. In some embodiments, the object sequence of the template RNA is added to the genome 5′ or 3′ within 0.1 kb, 0.25 kb, 0.5 kb, 0.75, kb, 1 kb, 2 kb, 3 kb, 4 kb, 5 kb, 7.5 kb, 10 kb, 15 kb, 20 kb, 25 kb, 50, 75 kb, or 100 kb of an endogenous active gene. In some embodiments the object sequence of the template RNA is added to the genome 5′ or 3′ within 0.1 kb, 0.25 kb, 0.5 kb, 0.75, kb, 1 kb, 2 kb, 3 kb, 4 kb, 5 kb, 7.5 kb, 10 kb, 15 kb, 20 kb, 25 kb, 50, 75 kb, or 100 kb of an endogenous promoter or enhancer. In some embodiments, the object sequence of the template RNA can be, e.g., 50-50,000 base pairs (e.g., between 50-40,000 bp, between 500-30,000 bp between 500-20,000 bp, between 100-15,000 bp, between 500-10,000 bp, between 50-10,000 bp, between 50-5,000 bp. In some embodiments, the heterologous object sequence is less than 1,000, 1,300, 1500, 2,000, 3,000, 4,000, 5,000, or 7,500 nucleotides in length.

[0429] In some embodiments the genomic safe harbor site is a Natural Harbor™ site. In some embodiments the Natural Harbor™ site is ribosomal DNA (rDNA). In some embodiments the Natural Harbor™ site is 5S rDNA, 18S rDNA, 5.8S rDNA, or 28S rDNA. In some embodiments the Natural Harbor™ site is the Mutsu site in 5S rDNA. In some embodiments the Natural Harbor™ site is the R2 site, the R5 site, the R6 site, the R4 site, the R1 site, the R9 site, or the RT site in 28S rDNA. In some embodiments the Natural Harbor™ site is the R8 site or the R7 site in 18S rDNA. In some embodiments the Natural Harbor™ site is DNA encoding transfer RNA (tRNA). In some embodiments the Natural Harbor™ site is DNA encoding tRNA-Asp or tRNA-Glu. In some embodiments the Natural Harbor™ site is DNA encoding spliceosomal RNA. In some embodiments the Natural Harbor™ site is DNA encoding small nuclear RNA (snRNA) such as U2 snRNA.

[0430] Thus, in some aspects, the present disclosure provides a method of inserting a heterologous object sequence into a Natural Harbor™ site. In some embodiments, the method comprises using a GeneWriter system described herein, e.g., using a polypeptide of any of Tables 1-3 or a polypeptide having sequence similarity thereto, e.g., at least 80%, 85%, 90%, or 95% identity thereto. In some embodiments, the method comprises using an enzyme, e.g., a retrotransposase, to insert the heterologous object sequence into the Natural Harbor™ site. In some aspects, the present disclosure provides a host human cell comprising a heterologous object sequence (e.g., a sequence encoding a therapeutic polypeptide) situated at a Natural Harbor™ site in the genome of the cell. In some embodiments, the Natural Harbor™ site is a site described in Table 5 below. In some embodiments, the heterologous object sequence is inserted within 20, 50, 100, 150, 200, 250, 500, or 1000 base pairs of a sequence shown in Table 5. In some embodiments, the heterologous object sequence is inserted within 0.1 kb, 0.25 kb, 0.5 kb, 0.75, kb, 1 kb, 2 kb, 3 kb, 4 kb, 5 kb, 7.5 kb, 10 kb, 15 kb, 20 kb, 25 kb, 50, 75 kb, or 100 kb of a sequence shown in Table 5. In some embodiments, the heterologous object sequence is inserted into a site having at least 70%, 75%, 80%, 85%, 90%, 95%, 96%, 97%, 98%, or 99% identity to a sequence shown in Table 5. In some embodiments, the heterologous object sequence is inserted within 20, 50, 100, 150, 200, 250, 500, or 1000 base pairs, or within 0.1 kb, 0.25 kb, 0.5 kb, 0.75, kb, 1 kb, 2 kb, 3 kb, 4 kb, 5 kb, 7.5 kb, 10 kb, 15 kb, 20 kb, 25 kb, 50, 75 kb, or 100 kb, of a site having at least 70%, 75%, 80%, 85%, 90%, 95%, 96%, 97%, 98%, or 99% identity to a sequence shown in Table 5. In some embodiments, the heterologous object sequence is inserted within a gene indicated in Column 5 of Table 5, or within 20, 50, 100, 150, 200, 250, 500, or 1000 base pairs, or within 0.1 kb, 0.25 kb, 0.5 kb, 0.75, kb, 1 kb, 2 kb, 3 kb, 4 kb, 5 kb, 7.5 kb, 10 kb, 15 kb, 20 kb, 25 kb, 50, 75 kb, or 100 kb, of the gene.

[0431] Table 5. Natural Harbor™ sites. Column 1 indicates a retrotransposon that inserts into the Natural Harbor™ site. Column 2 indicates the gene at the Natural Harbor™ site. Columns 3 and 4 show exemplary human genome sequence 5′ and 3′ of the insertion site (for example, 250 bp). Columns 5 and 6 list the example gene symbol and corresponding Gene ID.

TABLE 5
Exemplary Natural Harbor ™ Sites

| | | | | Example | |
|---|---|---|---|---|---|
| Target | Target | 5′ flanking | 3′ flanking | Gene | Example |
| Site | Gene | sequence | sequence | Symbol | Gene ID |
| R2 | 28S rDNA | CCGGTCCCCCCCGCCGGGTC | GTAGCCAAATGCCTCGTCAT | RNA28SN1 | 106632264 |
| | | CGCCCCCGGGGCCGCGGTTC | CTAATTAGTGACGCGCATGA | | |
| | | CGCGCGGCGCCTCGCCTCGG | ATGGATGAACGAGATTCCCA | | |
| | | CCGGCGCCTAGCAGCCGACT | CTGTCCCTACCTACTATCCA | | |
| | | TAGAACTGGTGCGGACCAGG | GCGAAACCACAGCCAAGGGA | | |
| | | GGAATCCGACTGTTTAATTA | ACGGGCTTGGCGGAATCAGC | | |
| | | AAACAAAGCATCGCGAAGGC | GGGGAAAGAAGACCCTGTTG | | |
| | | CCGCGGCGGGTGTTGACGCG | AGCTTGACTCTAGTCTGGCA | | |
| | | ATGTGATTTCTGCCCAGTGC | CGGTGAAGAGACATGAGAGG | | |
| | | TCTGAATGTCAAAGTGAAGA | TGTAGAATAAGTGGGAGGCC | | |
| | | AATTCAATGAAGCGCGGGTA | CCCGGCGCCCCCCCGGTGTC | | |
| | | AACGGCGGGAGTAACTATGA | CCCGCGAGGGGCCCGGGGCG | | |
| | | CTCTCTTAAG (SEQ ID | GGGTCCGCCG (SEQ ID | | |
| | | NO: 1508) | NO: 1513) | | |
| R4 | 28S rDNA | GCGGTTCCGCGCGGCGCCTC | CGCATGAATGGATGAACGAG | RNA28SN1 | 106632264 |
| | | GCCTCGGCCGGCGCCTAGCA | ATTCCCACTGTCCCTACCTA | | |
| | | GCCGACTTAGAACTGGTGCG | CTATCCAGCGAAACCACAGC | | |
| | | GACCAGGGGAATCCGACTGT | CAAGGGAACGGGCTTGGCGG | | |
| | | TTAATTAAAACAAAGCATCG | AATCAGCGGGGAAAGAAGAC | | |
| | | CGAAGGCCCGCGGCGGGTGT | CCTGTTGAGCTTGACTCTAG | | |
| | | TGACGCGATGTGATTTCTGC | TCTGGCACGGTGAAGAGACA | | |
| | | CCAGTGCTCTGAATGTCAAA | TGAGAGGTGTAGAATAAGTG | | |
| | | GTGAAGAAATTCAATGAAGC | GGAGGCCCCCGGCGCCCCCC | | |
| | | GCGGGTAAACGGCGGGAGTA | CGGTGTCCCCGCGAGGGGCC | | |
| | | ACTATGACTCTCTTAAGGTA | CGGGGCGGGGTCCGCCGGCC | | |
| | | GCCAAATGCCTCGTCATCTA | CTGCGGGCCGCCGGTGAAAT | | |
| | | ATTAGTGACG (SEQ ID | ACCACTACTC (SEQ ID | | |
| | | NO: 1509) | NO: 1514) | | |
| R5 | 28S rDNA | TCCCCCCCGCCGGGTCCGCC | CCAAATGCCTCGTCATCTAA | RNA28SN1 | 106632264 |
| | | CCCGGGGCCGCGGTTCCGCG | TTAGTGACGCGCATGAATGG | | |
| | | CGGCGCCTCGCCTCGGCCGG | ATGAACGAGATTCCCACTGT | | |
| | | CGCCTAGCAGCCGACTTAGA | CCCTACCTACTATCCAGCGA | | |
| | | ACTGGTGCGGACCAGGGGAA | AACCACAGCCAAGGGAACGG | | |
| | | TCCGACTGTTTAATTAAAAC | GCTTGGCGGAATCAGCGGGG | | |
| | | AAAGCATCGCGAAGGCCCGC | AAAGAAGACCCTGTTGAGCT | | |
| | | GGCGGGTGTTGACGCGATGT | TGACTCTAGTCTGGCACGGT | | |
| | | GATTTCTGCCCAGTGCTCTG | GAAGAGACATGAGAGGTGTA | | |
| | | AATGTCAAAGTGAAGAAATT | GAATAAGTGGGAGGCCCCCG | | |
| | | CAATGAAGCGCGGGTAAACG | GCGCCCCCCCGGTGTCCCCG | | |
| | | GCGGGAGTAACTATGACTCT | CGAGGGGCCCGGGGCGGGGT | | |
| | | CTTAAGGTAG (SEQ ID | CCGCCGGCCC (SEQ ID | | |
| | | NO: 1510) | NO: 1515) | | |
| R9 | 28S rDNA | CGGCGCGCTCGCCGGCCGAG | TAGCTGGTTCCCTCCGAAGT | RNA28SN1 | 106632264 |
| | | GTGGGATCCCGAGGCCTCTC | TTCCCTCAGGATAGCTGGCG | | |
| | | CAGTCCGCCGAGGGCGCACC | CTCTCGCAGACCCGACGCAC | | |
| | | ACCGGCCCGTCTCGCCCGCC | CCCCGCCACGCAGTTTTATC | | |
| | | GCGCCGGGGAGGTGGAGCAC | CGGTAAAGCGAATGATTAGA | | |
| | | GAGCGCACGTGTTAGGACCC | GGTCTTGGGGCCGAAACGAT | | |
| | | GAAAGATGGTGAACTATGCC | CTCAACCTATTCTCAAACTT | | |
| | | TGGGCAGGGCGAAGCCAGAG | TAAATGGGTAAGAAGCCCGG | | |
| | | GAAACTCTGGTGGAGGTCCG | CTCGCTGGCGTGGAGCCGGG | | |
| | | TAGCGGTCCTGACGTGCAAA | CGTGGAATGCGAGTGCCTAG | | |
| | | TCGGTCGTCCGACCTGGGTA | TGGGCCACTTTTGGTAAGCA | | |
| | | TAGGGGCGAAAGACTAATCG | GAACTGGCGCTGCGGGATGA | | |
| | | AACCATCTAG (SEQ ID | ACCGAACGCC (SEQ ID | | |
| | | NO: 1511) | NO: 1516) | | |
| R8 | 18S rDNA | GCATTCGTATTGCGCCGCTA | TGAAACTTAAAGGAATTGAC | RNA18SN1 | 106631781 |
| | | GAGGTGAAATTCTTGGACCG | GGAAGGGCACCACCAGGAGT | | |
| | | GCGCAAGACGGACCAGAGCG | GGAGCCTGCGGCTTAATTTG | | |
| | | AAAGCATTTGCCAAGAATGT | ACTCAACACGGGAAACCTCA | | |
| | | TTTCATTAATCAAGAACGAA | CCCGGCCCGGACACGGACAG | | |
| | | AGTCGGAGGTTCGAAGACGA | GATTGACAGATTGATAGCTC | | |
| | | TCAGATACCGTCGTAGTTCC | TTTCTCGATTCCGTGGGTGG | | |
| | | GACCATAAACGATGCCGACC | TGGTGCATGGCCGTTCTTAG | | |
| | | GGCGATGCGGCGGCGTTATT | TTGGTGGAGCGATTTGTCTG | | |
| | | CCCATGACCCGCCGGGCAGC | GTTAATTCCGATAACGAACG | | |
| | | TTCCGGGAAACCAAAGTCTT | AGACTCTGGCATGCTAACTA | | |
| | | TGGGTTCCGGGGGGAGTATG | GTTACGCGACCCCCGAGCGG | | |
| | | GTTGCAAAGC (SEQ ID | TCGGCGTCCC (SEQ ID | | |
| | | NO: 1512) | NO: 1517) | | |
| R4- | tRNA-Asp | | | TRD-GTC1-1 | 100189207 |
| 2_SRa | | | | | |
| LIN25_ | tRNA-Glu | | | TRE-CTC1-1 | 100189384 |
| SM | | | | | |
| R1 | 28S rDNA | TAGCAGCCGACTTAGAACTG | ACCTACTATCCAGCGAAACC | RNA28SN1 | 106632264 |
| | | GTGCGGACCAGGGGAATCCG | ACAGCCAAGGGAACGGGCTT | | |
| | | ACTGTTTAATTAAAACAAAG | GGCGGAATCAGCGGGGAAAG | | |
| | | CATCGCGAAGGCCCGCGGCG | AAGACCCTGTTGAGCTTGAC | | |
| | | GGTGTTGACGCGATGTGATT | TCTAGTCTGGCACGGTGAAG | | |
| | | TCTGCCCAGTGCTCTGAATG | AGACATGAGAGGTGTAGAAT | | |
| | | TCAAAGTGAAGAAATTCAAT | AAGTGGGAGGCCCCCGGCGC | | |
| | | GAAGCGCGGGTAAACGGCGG | CCCCCCGGTGTCCCCGCGAG | | |
| | | GAGTAACTATGACTCTCTTA | GGGCCCGGGGCGGGGTCCGC | | |
| | | AGGTAGCCAAATGCCTCGTC | CGGCCCTGCGGGCCGCCGGT | | |
| | | ATCTAATTAGTGACGCGCAT | GAAATACCACTACTCTGATC | | |
| | | GAATGGATGAACGAGATTCC | GTTTTTTCACTGACCCGGTG | | |
| | | CACTGTCCCT (SEQ ID | AGGCGGGGGG (SEQ ID | | |
| | | NO: 1518) | NO: 1524) | | |
| R6 | 28S rDNA | CCCCCCGCCGGGTCCGCCCC | AAATGCCTCGTCATCTAATT | RNA28SN1 | 106632264 |
| | | CGGGGCCGCGGTTCCGCGCG | AGTGACGCGCATGAATGGAT | | |
| | | GCGCCTCGCCTCGGCCGGCG | GAACGAGATTCCCACTGTCC | | |
| | | CCTAGCAGCCGACTTAGAAC | CTACCTACTATCCAGCGAAA | | |
| | | TGGTGCGGACCAGGGGAATC | CCACAGCCAAGGGAACGGGC | | |
| | | CGACTGTTTAATTAAAACAA | TTGGCGGAATCAGCGGGGAA | | |
| | | AGCATCGCGAAGGCCCGCGG | AGAAGACCCTGTTGAGCTTG | | |
| | | CGGGTGTTGACGCGATGTGA | ACTCTAGTCTGGCACGGTGA | | |
| | | TTTCTGCCCAGTGCTCTGAA | AGAGACATGAGAGGTGTAGA | | |
| | | TGTCAAAGTGAAGAAATTCA | ATAAGTGGGAGGCCCCCGGC | | |
| | | ATGAAGCGCGGGTAAACGGC | GCCCCCCCGGTGTCCCCGCG | | |
| | | GGGAGTAACTATGACTCTCT | AGGGGCCCGGGGCGGGGTCC | | |
| | | TAAGGTAGCC (SEQ ID | GCCGGCCCTG (SEQ ID | | |
| | | NO: 1519) | NO: 1525) | | |
| R7 | 18S rDNA | GCGCAAGACGGACCAGAGCG | GGAGCCTGCGGCTTAATTTG | RNA18SN1 | 106631781 |
| | | AAAGCATTTGCCAAGAATGT | ACTCAACACGGGAAACCTCA | | |
| | | TTTCATTAATCAAGAACGAA | CCCGGCCCGGACACGGACAG | | |
| | | AGTCGGAGGTTCGAAGACGA | GATTGACAGATTGATAGCTC | | |
| | | TCAGATACCGTCGTAGTTCC | TTTCTCGATTCCGTGGGTGG | | |
| | | GACCATAAACGATGCCGACC | TGGTGCATGGCCGTTCTTAG | | |
| | | GGCGATGCGGCGGCGTTATT | TTGGTGGAGCGATTTGTCTG | | |
| | | CCCATGACCCGCCGGGCAGC | GTTAATTCCGATAACGAACG | | |
| | | TTCCGGGAAACCAAAGTCTT | AGACTCTGGCATGCTAACTA | | |
| | | TGGGTTCCGGGGGGAGTATG | GTTACGCGACCCCCGAGCGG | | |
| | | GTTGCAAAGCTGAAACTTAA | TCGGCGTCCCCCAACTTCTT | | |
| | | AGGAATTGACGGAAGGGCAC | AGAGGGACAAGTGGCGTTCA | | |
| | | CACCAGGAGT (SEQ ID | GCCACCCGAG (SEQ ID | | |
| | | NO: 1520) | NO: 1526) | | |
| RT | 28S rDNA | GGCCGGGCGCGACCCGCTCC | AACTGGCTTGTGGCGGCCAA | RNA28SN1 | 106632264 |
| | | GGGGACAGTGCCAGGTGGGG | GCGTTCATAGCGACGTCGCT | | |
| | | AGTTTGACTGGGGCGGTACA | TTTTGATCCTTCGATGTCGG | | |
| | | CCTGTCAAACGGTAACGCAG | CTCTTCCTATCATTGTGAAG | | |
| | | GTGTCCTAAGGCGAGCTCAG | CAGAATTCACCAAGCGTTGG | | |
| | | GGAGGACAGAAACCTCCCGT | ATTGTTCACCCACTAATAGG | | |
| | | GGAGCAGAAGGGCAAAAGCT | GAACGTGAGCTGGGTTTAGA | | |
| | | CGCTTGATCTTGATTTTCAG | CCGTCGTGAGACAGGTTAGT | | |
| | | TACGAATACAGACCGTGAAA | TTTACCCTACTGATGATGTG | | |
| | | GCGGGGCCTCACGATCCTTC | TTGTTGCCATGGTAATCCTG | | |
| | | TGACCTTTTGGGTTTTAAGC | CTCAGTACGAGAGGAACCGC | | |
| | | AGGAGGTGTCAGAAAAGTTA | AGGTTCAGACATTTGGTGTA | | |
| | | CCACAGGGAT (SEQ ID | TGTGCTTGGC (SEQ ID | | |
| | | NO: 1521) | NO: 1527) | | |
| Mutsu | 5S rDNA | GTCTACGGCCATACCACCC | TGAACGCGCCCGATCTCGTC | RNA5S1 | 100169751 |
| | | (SEQ ID NO: 1522) | TGATCTCGGAAGCTAAGCAG | | |
| | | | GGTCGGGCCTGGTTAGTACT | | |
| | | | TGGATGGGAGACCGCCTGGG | | |
| | | | AATACCGGGTGCTGTAGGCT | | |
| | | | TT (SEQ ID NO: 1528) | | |
| Utopia/ | U2 snRNA | ATCGCTTCTCGGCCTTTTGG | TCTGTTCTTATCAGTTTAAT | RNU2-1 | 6066 |
| Keno | | CTAAGATCAAGTGTAGTA | ATCTGATACGTCCTCTATCC | | |
| | | (SEQ ID NO: 1523) | GAGGACAATATATTAAATGG | | |
| | | | ATTTTTGGAGCAGGGAGATG | | |
| | | | GAATAGGAGCTTGCTCCGTC | | |
| | | | CACTCCACGCATCGACCTGG | | |
| | | | TATTGCAGTACCTCCAGGAA | | |
| | | | CGGTGCACCC (SEQ ID | | |
| | | | NO: 1529) | | |

[0432] In some embodiments, a system or method described herein results in insertion of a heterologous sequence into a target site in the human genome. In some embodiments, the target site in the human genome has sequence similarity to the corresponding target site of the corresponding wild-type retrotransposase (e.g., the retrotransposase from which the GeneWriter was derived) in the genome of the organism to which it is native. For instance, in some embodiments, the identity between the 40 nucleotides of human genome sequence centered at the insertion site and the 40 nucleotides of native organism genome sequence centered at the insertion site is less than 99.5%, 99%, 98%, 97%, 96%, 95%, 90%, 85%, 80%, 75%, 70%, 60%, or 50%, or is between 50-60%, 60-70%, 70-80%, 80-90%, or 90-100%. In some embodiments, the identity between the 100 nucleotides of human genome sequence centered at the insertion site and the 100 nucleotides of native organism genome sequence centered at the insertion site is less than 99.5%, 99%, 98%, 97%, 96%, 95%, 90%, 85%, 80%, 75%, 70%, 60%, or 50%, or is between 50-60%, 60-70%, 70-80%, 80-90%, or 90-100%. In some embodiments, the identity between the 500 nucleotides of human genome sequence centered at the insertion site and the 500 nucleotides of native organism genome sequence centered at the insertion site is less than 99.5%, 99%, 98%, 97%, 96%, 95%, 90%, 85%, 80%, 75%, 70%, 60%, or 50%, or is between 50-60%, 60-70%, 70-80%, 80-90%, or 90-100%.

[0433] Additional Template Features

[0434] In some embodiments, the template (e.g., template RNA) comprises certain structural features, e.g., determined in silico. In embodiments, the template RNA is predicted to have minimal energy structures between −280 and −480 kcal/mol (e.g., between −280 to −300 , −300 to −350 , −350 to −400 , −400 to −450, or −450 to −480 kcal/mol), e.g., as measured by RNAstructure, e.g., as described in Turner and Mathews Nucleic Acids Res 38:D280-282 (2009) (incorporated herein by reference in its entirety).

[0435] In some embodiments, the template (e.g., template RNA) comprises certain structural features, e.g., determined in vitro. In embodiments, the template RNA is sequence optimized, e.g., to reduce secondary structure as determined in vitro, for example, by SHAPE-MaP (e.g., as described in Siegfried et al. Nat Methods 11:959-965 (2014); incorporated herein by reference in its entirety). In some embodiments, the template (e.g., template RNA) comprises certain structural features, e.g., determined in cells. In embodiments, the template RNA is sequence optimized, e.g., to reduce secondary structure as measured in cells, for example, by DMS-MaPseq (e.g., as described in Zubradt et al. Nat Methods 14:75-82 (2017); incorporated by reference herein in its entirety).

### Additional Functional Characteristics for Gene Writers™

[0436] A Gene Writer as described herein may, in some instances, be characterized by one or more functional measurements or characteristics. In some embodiments, the DNA binding domain has one or more of the functional characteristics described below. In some embodiments, the RNA binding domain has one or more of the functional characteristics described below. In some embodiments, the endonuclease domain has one or more of the functional characteristics described below. In some embodiments, the reverse transcriptase domain has one or more of the functional characteristics described below. In some embodiments, the template (e.g., template RNA) has one or more of the functional characteristics described below. In some embodiments, the target site bound by the Gene Writer has one or more of the functional characteristics described below.

[0437] Gene Writer Polypeptide

[0438] DNA Binding Domain

[0439] In some embodiments, the DNA binding domain is capable of binding to a target sequence (e.g., a dsDNA target sequence) with greater affinity than a reference DNA binding domain. In some embodiments, the reference DNA binding domain is a DNA binding domain from R2_BM of B. mori. In some embodiments, the DNA binding domain is capable of binding to a target sequence (e.g., a dsDNA target sequence) with an affinity between 100 pM-10 nM (e.g., between 100 pM-1 nM or 1 nM-10 nM).

[0440] In some embodiments, the affinity of a DNA binding domain for its target sequence (e.g., dsDNA target sequence) is measured in vitro, e.g., by thermophoresis, e.g., as described in Asmari et al. Methods 146:107-119 (2018) (incorporated by reference herein in its entirety).

[0441] In embodiments, the DNA binding domain is capable of binding to its target sequence (e.g., dsDNA target sequence), e.g, with an affinity between 100 pM-10 nM (e.g., between 100 pM-1 nM or 1 nM-10 nM) in the presence of a molar excess of scrambled sequence competitor dsDNA, e.g., of about 100-fold molar excess.

[0442] In some embodiments, the DNA binding domain is found associated with its target sequence (e.g., dsDNA target sequence) more frequently than any other sequence in the genome of a target cell, e.g., human target cell, e.g., as measured by ChIP-seq (e.g., in HEK293T cells), e.g., as described in He and Pu (2010) Curr. Protoc Mol Biol Chapter 21 (incorporated herein by reference in its entirety). In some embodiments, the DNA binding domain is found associated with its target sequence (e.g., dsDNA target sequence) at least about 5-fold or 10-fold, more frequently than any other sequence in the genome of a target cell, e.g., as measured by ChIP-seq (e.g., in HEK293T cells), e.g., as described in He and Pu (2010), supra.

[0443] In some embodiments, a Gene Writer polypeptide comprises a modification to a DNA-binding domain, e.g., relative to the wild-type polypeptide. In some embodiments, the DNA-binding domain comprises an addition, deletion, replacement, or modification to the amino acid sequence of the original DNA-binding domain. In some embodiments, the DNA-binding domain is modified to include a heterologous functional domain that binds specifically to a target nucleic acid (e.g., DNA) sequence of interest. In some embodiments, the functional domain replaces at least a portion (e.g., the entirety of) the prior DNA-binding domain of the polypeptide. In some embodiments, the functional domain comprises a zinc finger (e.g., a zinc finger that specifically binds to the target nucleic acid (e.g., DNA) sequence of interest. In some embodiments, the functional domain comprises a Cas domain (e.g., a Cas domain that specifically binds to the target nucleic acid (e.g., DNA) sequence of interest. In embodiments, the Cas domain comprises a Cas9 or a mutant or variant thereof (e.g., as described herein). In embodiments, the Cas domain is associated with a guide RNA (gRNA), e.g., as described herein. In embodiments, the Cas domain is directed to a target nucleic acid (e.g., DNA) sequence of interest by the gRNA. In embodiments, the Cas domain is encoded in the same nucleic acid (e.g., RNA) molecule as the gRNA. In embodiments, the Cas domain is encoded in a different nucleic acid (e.g., RNA) molecule from the gRNA.

[0444] RNA Binding Domain

[0445] In some embodiments, the RNA binding domain is capable of binding to a template RNA with greater affinity than a reference RNA binding domain. In some embodiments, the reference RNA binding domain is an RNA binding domain from R2_BM of B. mori. In some embodiments, the RNA binding domain is capable of binding to a template RNA with an affinity between 100 pM-10 nM (e.g., between 100 pM-1 nM or 1 nM-10 nM). In some embodiments, the affinity of a RNA binding domain for its template RNA is measured in vitro, e.g., by thermophoresis, e.g., as described in Asmari et al. Methods 146:107-119 (2018) (incorporated by reference herein in its entirety). In some embodiments, the affinity of a RNA binding domain for its template RNA is measured in cells (e.g., by FRET or CLIP-Seq).

[0446] In some embodiments, the RNA binding domain is associated with the template RNA in vitro at a frequency at least about 5-fold or 10-fold higher than with a scrambled RNA. In some embodiments, the frequency of association between the RNA binding domain and the template RNA or scrambled RNA is measured by CLIP-seq, e.g., as described in Lin and Miles (2019) Nucleic Acids Res 47(11):5490-5501 (incorporated by reference herein in its entirety). In some embodiments, the RNA binding domain is associated with the template RNA in cells (e.g., in HEK293T cells) at a frequency at least about 5-fold or 10-fold higher than with a scrambled RNA. In some embodiments, the frequency of association between the RNA binding domain and the template RNA or scrambled RNA is measured by CLIP-seq, e.g., as described in Lin and Miles (2019), supra.

[0447] Endonuclease Domain

[0448] In some embodiments, the endonuclease domain is associated with the target dsDNA in vitro at a frequency at least about 5-fold or 10-fold higher than with a scrambled dsDNA. In some embodiments, the endonuclease domain is associated with the target dsDNA in vitro at a frequency at least about 5-fold or 10-fold higher than with a scrambled dsDNA, e.g., in a cell (e.g., a HEK293T cell). In some embodiments, the frequency of association between the endonuclease domain and the target DNA or scrambled DNA is measured by ChIP-seq, e.g., as described in He and Pu (2010) Curr. Protoc Mol Biol Chapter 21 (incorporated by reference herein in its entirety).

[0449] In some embodiments, the endonuclease domain can catalyze the formation of a nick at a target sequence, e.g., to an increase of at least about 5-fold or 10-fold relative to a non-target sequence (e.g., relative to any other genomic sequence in the genome of the target cell). In some embodiments, the level of nick formation is determined using NickSeq, e.g., as described in Elacqua et al. (2019) bioRxiv doi.org/10.1101/867937 (incorporated herein by reference in its entirety).

[0450] In some embodiments, the endonuclease domain is capable of nicking DNA in vitro. In embodiments, the nick results in an exposed base. In embodiments, the exposed base can be detected using a nuclease sensitivity assay, e.g., as described in Chaudhry and Weinfeld (1995) Nucleic Acids Res 23(19):3805-3809 (incorporated by reference herein in its entirety). In embodiments, the level of exposed bases (e.g., detected by the nuclease sensitivity assay) is increased by at least 10%, 50%, or more relative to a reference endonuclease domain. In some embodiments, the reference endonuclease domain is an endonuclease domain from R2_BM of B. mori.

[0451] In some embodiments, the endonuclease domain is capable of nicking DNA in a cell. In embodiments, the endonuclease domain is capable of nicking DNA in a HEK293T cell. In embodiments, an unrepaired nick that undergoes replication in the absence of Rad51 results in increased NHEJ rates at the site of the nick, which can be detected, e.g., by using a Rad51 inhibition assay, e.g., as described in Bothmer et al. (2017) Nat Commun 8:13905 (incorporated by reference herein in its entirety). In embodiments, NHEJ rates are increased above 0-5%. In embodiments, NHEJ rates are increased to 20-70% (e.g., between 30%-60% or 40-50%), e.g., upon Rad51 inhibition.

[0452] In some embodiments, the endonuclease domain releases the target after cleavage. In some embodiments, release of the target is indicated indirectly by assessing for multiple turnovers by the enzyme, e.g., as described in Yourik at al. RNA 25(1):35-44 (2019) (incorporated herein by reference in its entirety) and shown in FIG. 2. In some embodiments, the kₑₓₚ of an endonuclease domain is 1×10⁻³-1×10⁻5 min-1 as measured by such methods.

[0453] In some embodiments, the endonuclease domain has a catalytic efficiency (k_{cat}/Kₘ) greater than about 1×10⁸ s⁻¹ M⁻¹ in vitro. In embodiments, the endonuclease domain has a catalytic efficiency greater than about 1×10⁵, 1×10⁶, 1×10⁷, or 1×10⁸, s⁻¹ M⁻¹ in vitro. In embodiments, catalytic efficiency is determined as described in Chen et al. (2018) Science 360(6387):436-439 (incorporated herein by reference in its entirety). In some embodiments, the endonuclease domain has a catalytic efficiency (k_{cat}/Kₘ) greater than about 1×10⁸ s⁻¹ M⁻¹ in cells. In embodiments, the endonuclease domain has a catalytic efficiency greater than about 1×10⁵, 1×10⁶, 1×10⁷, or 1×10⁸ s⁻¹ M⁻¹ in cells.

[0454] In some embodiments, a Gene Writer polypeptide comprises a modification to an endonuclease domain, e.g., relative to the wild-type polypeptide. In some embodiments, the endonuclease domain comprises an addition, deletion, replacement, or modification to the amino acid sequence of the original endonuclease domain. In some embodiments, the endonuclease domain is modified to include a heterologous functional domain that binds specifically to and/or induces endonuclease cleavage of a target nucleic acid (e.g., DNA) sequence of interest. In some embodiments, the endonuclease domain comprises a zinc finger. In some embodiments, the endonuclease domain comprises a Cas domain (e.g., a Cas9 or a mutant or variant thereof). In embodiments, the endonuclease domain comprising the Cas domain is associated with a guide RNA (gRNA), e.g., as described herein. In some embodiments, the endonuclease domain is modified to include a functional domain that does not target a specific target nucleic acid (e.g., DNA) sequence. In embodiments, the endonuclease domain comprises a Fok1 domain.

[0455] Reverse Transcriptase Domain

[0456] In some embodiments, the reverse transcriptase domain has a lower probability of premature termination rate (P_{off}) in vitro relative to a reference reverse transcriptase domain. In some embodiments, the reference reverse transcriptase domain is a reverse transcriptase domain from R2_BM of B. mori or a viral reverse transcriptase domain, e.g., the RT domain from M-MLV.

[0457] In some embodiments, the reverse transcriptase domain has a lower probability of premature termination rate (P_{off}) in vitro of less than about 5×10⁻³/nt, 5×10⁻⁴/nt, or 5×10⁻⁶/nt, e.g., as measured on a 1094 nt RNA. In embodiments, the in vitro premature termination rate is determined as described in Bibillo and Eickbush (2002) J Biol Chem 277(38):34836-34845 (incorporated by reference herein its entirety).

[0458] In some embodiments, the reverse transcriptase domain is able to complete at least about 30% or 50% of integrations in cells. The percent of complete integrations can be measured by dividing the number of substantially full-length integration events (e.g., genomic sites that comprise at least 98% of the expected integrated sequence) by the number of total (including substantially full-length and partial) integration events in a population of cells. In embodiments, the integrations in cells is determined (e.g., across the integration site) using long-read amplicon sequencing, e.g., as described in Karst et al. (2020) bioRxiv doi.org/10.1101/645903 (incorporated by reference herein its in entirety).

[0459] In embodiments, quantifying integrations in cells comprises counting the fraction of integrations that contain at least about 75%, 80%, 85%, 90%, 95%, 96%, 97%, 98%, 99%, or 100% of the DNA sequence corresponding to the template RNA (e.g., a template RNA having a length of at least 0.05, 0.1, 0.5, 0.6, 0.7, 0.8, 0.9, 1, 1.5, 2, 3, 4, or 5 kb, e.g., a length between 0.5-0.6, 0.6-0.7, 0.7-0.8, 0.8-0.9, 1.0-1.2, 1.2-1.4, 1.4-1.6, 1.6-1.8, 1.8-2.0, 2-3, 3-4, or 4-5 kb).

[0460] In some embodiments, the reverse transcriptase domain is capable of polymerizing dNTPs in vitro. In embodiments, the reverse transcriptase domain is capable of polymerizing dNTPs in vitro at a rate between 0.1-50 nt/sec (e.g., between 0.1-1, 1-10, or 10-50 nt/sec). In embodiments, polymerization of dNTPs by the reverse transcriptase domain is measured by a single-molecule assay, e.g., as described in Schwartz and Quake (2009) PNAS 106(48):20294-20299 (incorporated by reference in its entirety).

[0461] In some embodiments, the reverse transcriptase domain has an in vitro error rate (e.g., misincorporation of nucleotides) of between 1×10⁻³-1×10⁻⁴ or 1×10⁻⁴-1×10⁻⁵ substitutions/nt, e.g., as described in Yasukawa et al. (2017) Biochem Biophys Res Commun 492(2):147-153 (incorporated herein by reference in its entirety). In some embodiments, the reverse transcriptase domain has an error rate (e.g., misincorporation of nucleotides) in cells (e.g., HEK293T cells) of between 1×10⁻³-1×10⁻⁴ or 1×10⁻⁴-1×10⁻⁵ substitutions/nt, e.g., by long-read amplicon sequencing, e.g., as described in Karst et al. (2020) bioRxiv doi.org/10.1101/645903 (incorporated by reference herein in its entirety).

[0462] In some embodiments, the reverse transcriptase domain is capable of performing reverse transcription of a target RNA in vitro. In some embodiments, the reverse transcriptase requires a primer of at least 3 nt to initiate reverse transcription of a template. In some embodiments, reverse transcription of the target RNA is determined by detection of cDNA from the target RNA (e.g., when provided with a ssDNA primer, e.g., which anneals to the target with at least 3, 4, 5, 6, 7, 8, 9, or 10 nt at the 3′ end), e.g., as described in Bibillo and Eickbush (2002) J Biol Chem 277(38):34836-34845 (incorporated herein by reference in its entirety).

[0463] In some embodiments, the reverse transcriptase domain performs reverse transcription at least 5 or 10 times more efficiently (e.g., by cDNA production), e.g., when converting its RNA template to cDNA, for example, as compared to an RNA template lacking the protein binding motif (e.g., a 3′ UTR). In embodiments, efficiency of reverse transcription is measured as described in Yasukawa et al. (2017) Biochem Biophys Res Commun 492(2):147-153 (incorporated by reference herein in its entirety).

[0464] In some embodiments, the reverse transcriptase domain specifically binds a specific RNA template with higher frequency (e.g., about 5 or 10-fold higher frequency) than any endogenous cellular RNA, e.g., when expressed in cells (e.g., HEK293T cells). In embodiments, frequency of specific binding between the reverse transcriptase domain and the template RNA are measured by CLIP-seq, e.g., as described in Lin and Miles (2019) Nucleic Acids Res 47(11):5490-5501 (incorporated herein by reference in its entirety).

[0465] In some embodiments, a Gene Writer as described herein comprises a polypeptide associated with a guide RNA (gRNA). In certain embodiments, the gRNA is comprised in the template nucleic acid molecule. In other embodiments, the gRNA is separate from the template nucleic acid molecule. In some embodiments wherein the gRNA is comprised in the template nucleic acid molecule, the template nucleic acid molecule further comprises a gRNA spacer sequence (e.g., at or within 1, 2, 3, 4, 5, 10, 15, 20, 25, 30, 40, 50, 60, 70, 80, 90, or 100 nucleotides of its 5′ end). In embodiments, the gRNA spacer comprises a sequence having at least 85%, 90%, 95%, 96%, 97%, 98%, 99%, or 100% sequence identity to a nucleic acid sequence comprised in the target nucleic acid molecule. In embodiments, the gRNA spacer directs Cas domain (e.g., Cas9) activity at the nucleic acid sequence comprised in the target nucleic acid molecule. In some embodiments wherein the gRNA is comprised in the template nucleic acid molecule, the template nucleic acid molecule further comprises a primer binding site (e.g., at or within 1, 2, 3, 4, 5, 10, 15, 20, 25, 30, 40, 50, 60, 70, 80, 90, or 100 nucleotides of its 3′ end). In embodiments, the primer binding site comprises a nucleic acid sequence comprising at least 85%, 90%, 95%, 96%, 97%, 98%, 99%, or 100% sequence identity to a nucleic acid sequence positioned at the 5′ end (e.g., within 1, 2, 3, 4, 5, 6, 7, 8, 9, 10, 15, 20, 25, 30, 40, or 50 nucleotides) of a nick site on the target nucleic acid molecule. In embodiments, binding of the primer binding site to the target nucleic acid molecule operates to prime TPRT.

[0466] In some embodiments, the reverse transcriptase (RT) domain exhibits enhanced stringency of target-primed reverse transcription (TPRT) initiation, e.g., relative to an endogenous RT domain. In some embodiments, the RT domain initiates TPRT when the 3 nt in the target site immediately upstream of the first strand nick, e.g., the genomic DNA priming the RNA template, have at least 66% or 100% complementarity to the 3 nt of homology in the RNA template. In some embodiments, the RT domain initiates TPRT when there are less than 5 nt mismatched (e.g., less than 1, 2, 3, 4, or 5 nt mismatched) between the template RNA homology and the target DNA priming reverse transcription. In some embodiments, the RT domain is modified such that the stringency for mismatches in priming the TPRT reaction is increased, e.g., wherein the RT domain does not tolerate any mismatches or tolerates fewer mismatches in the priming region relative to a wild-type (e.g., unmodified) RT domain. In some embodiments, the RT domain comprises a HIV-1 RT domain. In embodiments, the HIV-1 RT domain initiates lower levels of synthesis even with three nucleotide mismatches relative to an alternative RT domain (e.g., as described by Jamburuthugoda and Eickbush J Mol Biol 407(5):661-672 (2011); incorporated herein by reference in its entirety).

[0467] Target Site

[0468] In some embodiments, after Gene Writing, the target site surrounding the integrated sequence contains a limited number of insertions or deletions, for example, in less than about 50% or 10% of integration events, e.g., as determined by long-read amplicon sequencing of the target site, e.g., as described in Karst et al. (2020) bioRxiv doi.org/10.1101/645903 (incorporated by reference herein in its entirety). In some embodiments, the target site does not show multiple insertion events, e.g., head-to-tail or head-to-head duplications, e.g., as determined by long-read amplicon sequencing of the target site, e.g., as described in Karst et al. bioRxiv doi.org/10.1101/645903 (2020) (incorporated herein by reference in its entirety). In some embodiments, the target site contains an integrated sequence corresponding to the template RNA. In some embodiments, the target site does not contain insertions resulting from endogenous RNA in more than about 1% or 10% of events, e.g., as determined by long-read amplicon sequencing of the target site, e.g., as described in Karst et al. bioRxiv doi.org/10.1101/645903 (2020) (incorporated herein by reference in its entirety). In some embodiments, the target site contains the integrated sequence corresponding to the template RNA.

[0469] In some embodiments, the target site contains an integrated sequence corresponding to the template RNA. In embodiments, the target site does not comprise sequence outside of the RT template (e.g., gRNA scaffold, vector backbone, and/or ITRs), e.g., as determined by long-read amplicon sequencing of the target site (for example, as described in Karst et al. bioRxiv doi.org/10.1101/645903 (2020); incorporated herein by reference in its entirety).

### Evolved Variants of Gene Writers

[0470] In some embodiments, the invention provides evolved variants of Gene Writers Evolved variants can, in some embodiments, be produced by mutagenizing a reference Gene Writer, or one of the fragments or domains comprised therein. In some embodiments, one or more of the domains (e.g., the reverse transcriptase. DNA binding (including, for example, sequence-guided DNA binding elements), RNA-binding, or endonuclease domain) is evolved One or more of such evolved variant domains can, in some embodiments, be evolved alone or together with other domains. An evolved variant domain or domains may, in some embodiments, be combined with unevolved cognate component(s) or evolved variants of the cognate component(s), e.g., which may have been evolved in either a parallel or serial manner.

[0471] In some embodiments, the process of mutagenizing a reference Gene Writer, or fragment or domain thereof, comprises mutagenizing the reference Gene Writer or fragment or domain thereof. In embodiments, the mutagenesis comprises a continuous evolution method (e.g., PACE) or non-contious evolution method (e.g., PANCE), e.g., as described herein. In some embodiments, the evolved Gene Writer, or a fragment or domain thereof, comprises one or more amino acid variations introduced into its amino acid sequence relative to the amino acid sequence of the reference Gene Writer, or fragment or domain thereof. In embodiments, amino acid sequence variations may include one or more mutated residues (e.g., conservative substitutions, non-conservative substitutions, or a combination thereof) within the amino acid sequence of a reference Gene Writer, e.g., as a result of a change in the nucleotide sequence encoding the gene writer that results in, e.g., a change in the codon at any particular position in the coding sequence, the deletion of one or more amino acids (e.g., a truncated protein), the insertion of one or more amino acids, or any combination of the foregoing. The evolved variant Gene Writer may include variants in one or more components or domains of the Gene Writer (e.g., variants introduced into a reverse transcriptase domain, endonuclease domain, DNA binding domain, RNA binding domain, or combinations thereof).

[0472] In some aspects, the invention provides Gene Writers, systems, kits, and methods using or comprising an evolved variant of a Gene Writer, e.g., employs an evolved variant of a Gene Writer or a Gene Writer produced or produceable by PACE or PANCE. In embodiments, the unevolved reference Gene Writer is a Gene Writer as disclosed herein.

[0473] The term “phage-assisted continuous evolution (PACE),” as used herein, generally refers to continuous evolution that employs phage as viral vectors Examples of PACE technology have been described, for example, in International PCT Application No. PCT/US 2009/056194, filed Sep. 8, 2009, published as WO 2010/028347 on Mar. 11, 2010: International PCT Application, PCT/US2011/066747, filed Dec. 22, 2011, published as WO 2012/088381 on Jun. 28, 2012; U.S. Pat. No. 9,023,594, issued May 5, 2015; U.S. Pat. No. 9,771,574, issued Sep. 26, 2017; U.S. Pat. No. 9,394,537, issued Jul. 19, 2016; International PCT Application, PCT/US2015/012022, filed Jan. 20, 2015, published as WO 2015/134121 on Sep. 11, 2015; U.S. Pat. No. 10,179,911, issued Jan. 15, 2019; and International PCT Application, PCT/US2016/027795, filed Apr. 15, 2016, published as WO 2016/168631 on Oct. 20, 2016, the entire contents of each of which are incorporated herein by reference.

[0474] The term “phage-assisted non-continuous evolution (PANCE),” as used herein, generally refers to non-continuous evolution that employs phage as viral vectors. Examples of PANCE technology have been described, for example, in Suzuki T. et al, Crystal structures reveal an elusive functional domain of pyrrolysyl-tRNA synthetase, Nat Chem Biol 13(12): 1261-1266 (2017), incorporated herein by reference in its entirety. Briefly, PANCE is a technique for rapid in vivo directed evolution using serial flask transfers of evolving selection phage (SP), which contain a gene of interest to be evolved, across fresh host cells (e.g, E. coli cells) Genes inside the host cell may be held constant while genes contained in the SP continuously evolve. Following phage growth, an aliquot of infected cells may be used to transfect a subsequent flask containing host E. coli. This process can be repeated and/or continued until the desired phenotype is evolved, e.g., for as many transfers as desired.

[0475] Methods of applying PACE and PANCE to Gene Writers may be readily appreciated by the skilled artisan by reference to, inter alia, the foregoing references. Additional exemplary methods for directing continuous evolution of genome-modifying proteins or systems, e.g., in a population of host cells, e.g., using phage particles, can be applied to generate evolved variants of Gene Writers, or fragments or subdomains thereof. Non-limiting examples of such methods are described in International PCT Application, PCT/US2009/056194, filed Sep. 8, 2009, published as WO 2010/028347 on Mar. 11, 2010; International PCT Application, PCT/US2011/066747, filed Dec. 22, 2011, published as WO 2012/088381 on Jun. 28, 2012; U.S. Pat. No. 9,023,594, issued May 5, 2015; U.S. Pat. No. 9,771,574, issued Sep. 26, 2017, U.S. Pat. No. 9,394,537, issued Jul. 19, 2016; International PCT Application, PCT/US2015/012022, filed Jan. 20, 2015, published as WO 2015/134121 on Sep. 11, 2015; U.S. Pat. No. 10,179,911, issued Jan. 15, 2019; International Application No. PCT/US2019/37216, filed Jun. 14, 2019, International Patent Publication WO 2019/023680, published Jan. 31, 2019, International PCT Application, PCT/US2016/027795, filed Apr. 15, 2016, published as WO 2016/168631 on Oct. 20, 2016, and International Patent Publication No. PCT/US2019/47996, filed Aug. 23, 2019, each of which is incorporated herein by reference in its entirety.

[0476] In some non-limiting illustrative embodiments, a method of evolution of a evolved variant Gene Writer, of a fragment or domain thereof, comprises (a) contacting a population of host cells with a population of viral vectors comprising the gene of interest (the starting Gene Writer or fragment or domain thereof), wherein (1) the host cell is amenable to infection by the viral vector; (2) the host cell expresses viral genes required for the generation of viral particles; (3) the expression of at least one viral gene required for the production of an infectious viral particle is dependent on a function of the gene of interest; and/or (4) the viral vector allows for expression of the protein in the host cell, and can be replicated and packaged into a viral particle by the host cell. In some embodiments, the method comprises (b) contacting the host cells with a mutagen, using host cells with mutations that elevate mutation rate (e.g., either by carrying a mutation plasmid or some genome modification—e.g, proofing-impaired DNA polymerase, SOS genes, such as UmuC, UmuD′, and/or RecA, which mutations, if plasmid-bound, may be under control of an inducible promoter), or a combination thereof. In some embodiments, the method comprises (c) incubating the population of host cells under conditions allowing for viral replication and the production of viral particles, wherein host cells are removed from the host cell population, and fresh, uninfected host cells are introduced into the population of host cells, thus replenishing the population of host cells and creating a flow of host cells. In some embodiments, the cells are incubated under conditions allowing for the gene of interest to acquire a mutation. In some embodiments, the method further comprises (d) isolating a mutated version of the viral vector, encoding an evolved gene product (e.g., an evolved variant Gene Writer, or fragment or domain thereof), from the population of host cells.

[0477] The skilled artisan will appreciate a variety of features employable within the above-described framework. For example, in some embodiments, the viral vector or the phage is a filamentous phage, for example, an M13 phage, e.g, an M13 selection phage. In certain embodiments, the gene required for the production of infectious viral particles is the M13 gene III (gIII). In embodiments, the phage may lack a functional gIII, but otherwise comprise gI, gII, gIV, gV, gVI, gVII, gVI, gIX, and a gX. In some embodiments, the generation of infectious VSV particles involves the envelope protein VSV-G. Various embodiments can use different retroviral vectors, for example, Murine Leukemia Virus vectors, or Lentiviral vectors. In embodiments, the retroviral vectors can efficiently be packaged with VSV-G envelope protein, e.g., as a substitute for the native envelope protein of the virus.

[0478] In some embodiments, host cells are incubated according to a suitable number of viral life cycles, e.g., at least 10, at least 20, at least 30, at least 40, at least 50, at least 100, at least 200, at least 300, at least 400, at least, 500, at least 600, at least 700, at least 800, at least 900, at least 1000, at least 1250, at least 1500, at least 1750, at least 2000, at least 2500, at least 3000, at least 4000, at least 5000, at least 7500, at least 10000, or more consecutive viral life cycles, which in on illustrative and non-limiting examples of M13 phage is 10-20 minutes per virus life cycle. Similarly, conditions can be modulated to adjust the time a host cell remains in a population of host cells, e.g., about 10, about 11, about 12, about 13, about 14, about 15, about 16, about 17, about 18, about 19, about 20, about 21, about 22, about 23, about 24, about 25, about 30, about 35, about 40, about 45, about 50, about 55, about 60, about 70, about 80, about 90, about 100, about 120, about 150, or about 180 minutes. Host cell populations can be controlled in part by density of the host cells, or, in some embodiments, the host cell density in an inflow, e.g., 10³ cells/ml, about 10⁴ cells/ml, about 10⁵ cells/ml, about 5-10⁵ cells/ml, about 10⁶ (cells/ml, about 5-10⁶ (cells/ml, about 10⁷ cells/ml, about 5-10⁷ cells/ml, about 10⁸ cells/ml, about 5-10⁸ cells/mi, about 10⁹ cells/ml, about 5·10⁹ cells/ml, about 10¹⁰ cells/ml, or about 5·10¹⁰ cells/ml.

### Promoters

[0479] In some embodiments, one or more promoter or enhancer elements are operably linked to a nucleic acid encoding a Gene Writer protein or a template nucleic acid, e.g., that controls expression of the heterologous object sequence. In certain embodiments, the one or more promoter or enhancer elements comprise cell-type or tissue specific elements. In some embodiments, the promoter or enhancer is the same or derived from the promoter or enhancer that naturally controls expression of the heterologous object sequence. For example, the ornithine transcarbomylase promoter and enhancer may be used to control expression of the ornithine transcarbomylase gene in a system or method provided by the invention for correcting ornithine transcarbomylase deficiencies. In some embodiments, a promoter for use in the invention is for a gene described in any one of Tables 9-22, e.g., which may be used with an allele of the reference gene, or, in other embodiments, with a heterologous gene. In some embodiments, the promoter is a promoter of Table 33 or a functional fragment or variant thereof.

[0480] Exemplary tissue specific promoters that are commercially available can be found, for example, at a uniform resource locator (e.g., www.invivogen.com/tissue-specific-promoters). In some embodiments, a promoter is a native promoter or a minimal promoter, e.g., which consists of a single fragment from the 5′ region of a given gene. In some embodiments, a native promoter comprises a core promoter and its natural 5′ UTR. In some embodiments, the 5′ UTR comprises an intron. In other embodiments, these include composite promoters, which combine promoter elements of different origins or were generated by assembling a distal enhancer with a minimal promoter of the same origin.

[0481] Exemplary cell or tissue specific promoters are provided in the tables, below, and exemplary nucleic acid sequences encoding them are known in the art and can be readily accessed using a variety of resources, such as the NCBI database, including RefSeq, as well as the Eukaryotic Promoter Database (//epd.epfl.ch//index.php).

TABLE 33
Exemplary cell or tissue-specific promoters

| Promoter | Target cells |
|---|---|
| B29 Promoter | B cells |
| CD14 Promoter | Monocytic Cells |
| CD43 Promoter | Leukocytes and platelets |
| CD45 Promoter | Hematopoeitic cells |
| CD68 promoter | macrophages |
| Desmin promoter | muscle cells |
| Elastase-l | pancreatic acinar cells |
| promoter | |
| Endoglin promoter | endothelial cells |
| fibronectin | differentiating cells, healing |
| promoter | tissue |
| Flt-1 promoter | endothelial cells |
| GFAP promoter | Astrocytes |
| GPIIB promoter | megakaryocytes |
| ICAM-2 Promoter | Endothelial cells |
| INF-Beta promoter | Hematopoeitic cells |
| Mb promoter | muscle cells |
| Nphs1 promoter | podocytes |
| OG-2 promoter | Osteoblasts, Odonblasts |
| SP-B promoter | Lung |
| Syn1 promoter | Neurons |
| WASP promoter | Hematopoeitic cells |
| SV40/bAlb | Liver |
| promoter | |
| SV40/bAlb | Liver |
| promoter | |
| SV40/Cd3 | Leukocytes and platelets |
| promoter | |
| SV40/CD45 | hematopoeitic cells |
| promoter | |
| NSE/RU5′ | Mature Neurons |
| promoter | |

TABLE 34
Additional exemplary cell or tissue-specific promoters

| Promoter | Gene Description | Gene Specificity |
|---|---|---|
| APOA2 | Apolipoprotein A-II | Hepatocytes (from hepatocyte |
| | | progenitors) |
| SERPINA | Serpin peptidase inhibitor, clade A | Hepatocytes |
| 1 (hAAT) | (alpha-1 | (from definitive endoderm |
| | antiproteinase, antitrypsin), member 1 | stage) |
| | (also named alpha 1 anti-tryps in) | |
| CYP3A | Cytochrome P450, family 3, | Mature Hepatocytes |
| | subfamily A, polypeptide | |
| MIR122 | MicroRNA 122 | Hepatocytes |
| | | (from early stage embryonic |
| | | liver cells) |
| | | and endoderm |

Pancreatic specific promoters

| | | |
|---|---|---|
| INS | Insulin | Pancreatic beta cells |
| | | (from definitive endoderm stage) |
| IRS2 | Insulin receptor substrate 2 | Pancreatic beta cells |
| Pdx1 | Pancreatic and duodenal | Pancreas |
| | homeobox 1 | (from definitive endoderm stage) |
| Alx3 | Aristaless-like homeobox 3 | Pancreatic beta cells |
| | | (from definitive endoderm stage) |
| Ppy | Pancreatic polypeptide | PP pancreatic cells |
| | | (gamma cells) |

Cardiac specific promoters

| | | |
|---|---|---|
| Myh6 | Myosin, heavy chain 6, cardiac | Late differentiation marker of cardiac |
| (aMHC) | muscle, alpha | muscle cells (atrial specificity) |
| MYL2 | Myosin, light chain 2, regulatory, | Late differentiation marker of cardiac |
| (MLC-2v) | cardiac, slow | muscle cells (ventricular specificity) |
| ITNN13 | Troponin 1 type 3 (cardiac) | Cardiomyocytes |
| (cTnl) | | (from immature state) |
| ITNN13 | Troponin 1 type 3 (cardiac) | Cardiomyocytes |
| (cTnl) | | (from immature state) |
| NPPA | Natriuretic peptide precursor A (also | Atrial specificity in adult cells |
| (ANF) | named Atrial Natriuretic Factor) | |
| Slc8a1 | Solute carrier family 8 | Cardiomyocytes from early |
| (Ncx1) | (sodium/calcium exchanger), member | developmental stages |
| | 1 | |

CNS specific promoters

| | | |
|---|---|---|
| SYN1 | Synapsin I | Neurons |
| (hSyn) | | |
| GFAP | Glial fibrillary acidic protein | Astrocytes |
| INA | Internexin neuronal intermediate | Neuroprogenitors |
| | filament protein, alpha (a-internexin) | |
| NES | Nestin | Neuroprogenitors and ectoderm |
| MOBP | Myelin-associated oligodendrocyte | Oligodendrocytes |
| | basic protein | |
| MBP | Myelin basic protein | Oligodendrocytes |
| TH | Tyrosine hydroxylase | Dopaminergic neurons |
| FOXA2 | Forkhead box A2 | Dopaminergic neurons (also used as a |
| (HNF3 | | marker of endoderm) |
| beta) | | |

Skin specific promoters

| | | |
|---|---|---|
| FLG | Filaggrin | Keratinocytes from granular layer |
| K14 | Keratin 14 | Keratinocytes from granular |
| | | and basal layers |
| TGM3 | Transglutaminase 3 | Keratinocytes from granular layer |

Immune cell specific promoters

| | | |
|---|---|---|
| ITGAM | Integrin, alpha M (complement | Monocytes, macrophages, granulocytes, |
| (CD11B) | component 3 receptor 3 subunit) | natural killer cells |

Urogential cell specific promoters

| Pbsn | Probasin | Prostatic epithelium |
|---|---|---|
| Upk2 | Uroplakin 2 | Bladder |
| Sbp | Spermine binding protein | |
| Ferll4 | Fer-1-like 4 | Bladder |

Endothelial cell specific promoters

| | | |
|---|---|---|
| ENG | Endoglin | Endothelial cells |

Pluripotent and embryonic cell specific promoters

| | | |
|---|---|---|
| Oct4 | POU class 5 homeobox 1 | Pluripotent cells |
| (POU5F1) | | (germ cells, ES cells, iPS cells) |
| NANOG | Nanog homeobox | Pluripotent cells |
| | | (ES cells, iPS cells) |
| Synthetic | Synthetic promoter based on a Oct-4 | Pluripotent cells (ES cells, iPS cells) |
| Oct4 | core enhancer element | |
| T | Brachyury | Mesoderm |
| brachyury | | |
| NES | Nestin | Neuroprogenitors and Ectoderm |
| SOX17 | SRY (sex determining region Y)-box | Endoderm |
| | 17 | |
| FOXA2 | Forkhead box A2 | Endoderm (also used as a marker of |
| (HNFJ | | dopaminergic neurons) |
| beta) | | |
| MIR122 | MicroRNA 122 | Endoderm and hepatocytes |
| | | (from early stage embryonic liver cells~ |

[0482] Depending on the host/vector system utilized, any of a number of suitable transcription and translation control elements, including constitutive and inducible promoters, transcription enhancer elements, transcription terminators, etc may be used in the expression vector (see e.g, Bitter et al. (1987) Methods in Enzymology, 153:516-544: incorporated herein by reference in its entirety).

[0483] In some embodiments, a nucleic acid encoding a Gene Writer or template nucleic acid is operably linked to a control element, e.g., a transcriptional control element, such as a promoter. The transcriptional control element may, in some embodiment, be functional in either a eukaryotic cell, e.g., a mammalian cell; or a prokaryotic cell (e.g., bacterial or archaeal cell). In some embodiments, a nucleotide sequence encoding a polypeptide is operably linked to multiple control elements, e.g., that allow expression of the nucleotide sequence encoding the polypeptide in both prokaryotic and eukaryotic cells

[0484] For illustration purposes, examples of spatially restricted promoters include, but are not limited to, neuron-specific promoters, adipocyte-specific promoters, cardiomyocyte-specific promoters, smooth muscle-specific promoters, photoreceptor-specific promoters, etc. Neuron-specific spatially restricted promoters include, but are not limited to, a neuron-specific enolase (NSE) promoter (see, e.g., EMBL HSENO2, X51956); an aromatic amino acid decarboxylase (AADC) promoter, a neurofilament promoter (see, e.g., GenBank HUMNFL, L04147), a synapsin promoter (see, e.g., GenBank HUMSYNIB, M55301); a thy-1 promoter (see, e.g., Chen et al. (1987) Cell 51:7-19; and Llewellyn, et al. (2010) Nat. Med. 16(10):1161-1166); a serotonin receptor promoter (see, e.g., GenBank S62283); a tyrosine hydroxylase promoter (TH) (see, e.g., Oh et al. (2009) Gene Ther 16:437; Sasaoka et al. (1992) Mol. Brain Res. 16:274; Boundy et al (1998) J. Neurosci. 18:9989; and Kaneda et al. (1991) Neuron 6:583-594); a GnRH promoter (see, e.g., Radovick et al. (1991) Proc. Natd. Acad. Sci. USA 88:3402-3406); an L7 promoter (see, e.g., Oberdick et al. (1990) Science 248.223-226); a DNMT promoter (see, e.g., Bartge et al. (1988) Proc. Natl. Acad. Sci. USA 85:3648-3652); an enkephalin promoter (see, e.g., Comb et al. (1988) EMBO J. 17:3793-3805): a myelin basic protein (MBP) promoter; a Ca2+-calmodulin-dependent protein kinase II-alpha (CanKIla) promoter (see, e.g., Mayford et al. (1996) Proc. Natl. Acad. Sci. USA 93:13250; and Casanova et al (2001) Genesis 31:37); a CMV enhancer/platelet-derived growth factor-β promoter (see, e.g., Liu et al. (2004) Gene Therapy 11:52-60); and the like.

[0485] Adipocyte-specific spatially restricted promoters include, but are not limited to, the aP2 gene promoter/enhancer. e.g., a region from −5.4 kb to +21 bp of a human aP2 gene (see, e.g., Tozzo et al. (1997) Endocrinol. 381604; Ross et al. (1990) Proc. Natd. Acad. Sci USA 87:9590; and Pavjani et al. (2005) Nat. Med. 11:797); a glucose transporter-4 (GLUT4) promoter (see, e.g., Knight et al. (2003) Proc. Natl. Acad. Sci. USA 100.14725); a fatty acid translocase (FAT/CD36) promoter (see, e.g., Kuriki et al. (2002) Biol. Pharm. Bull. 25:1476; and Sato et al. (2002) J Biol Chem 277.15703); a stearoyl-CoA desaturase-1 (SCDI) promoter (Tabor et al. (1999) J. Biol. Chem. 274:20603); a leptin promoter (see, e.g., Mason et al. (1998) Endocrinol. 139.1013, and Chen et al. (1999) Biochem. Biophys. Res. Comm. 262:187); an adiponectin promoter (see, e.g, Kita et al. (2005) Biochem. Biophys. Res Comm. 331:484; and Chakrabarti (2010) Endocrinol. 151:2408); an adipsin promoter (see, e.g., Platt et al. (1989) Proc. Natl. Acad. Sci. USA 86:7490); a resistin promoter (see, e.g., Seo et al. (2003) Molec Endocrinol 17.1522); and the like.

[0486] Cardiomyocyte-specific spatially restricted promoters include, but are not limited to, control sequences derived from the following genes: myosin light chain-2, α-myosin heavy chain, AE3, cardiac troponin C, cardiac actin, and the like. Franz et al (1997) Cardiovasc. Res. 35:560-566; Robbins et al. (1995) Ann. N.Y. Acad. Sci. 752:492-505; Linn et al. (1995) Circ. Res. 76:584-591; Parmacek et al. (1994) Mol. Cell. Biol. 14:1870-1885; Hunter et al. (1993) Hypertension 22.608-617; and Sartorelli et al. (1992) Proc Natl Acad. Sci. USA 89:4047-4051.

[0487] Smooth muscle-specific spatially restricted promoters include, but are not limited to, an SM22α promoter (see, e.g., Akyurek et al. (2000) Mol Med. 6:983; and U.S. Pat. No. 7,169,874); a smoothelin promoter (see, e.g., WO 2001/018048); an α-smooth muscle actin promoter; and the like. For example, a 0.4 kb region of the SM22a promoter, within which lie two CArG elements, has been shown to mediate vascular smooth muscle cell-specific expression (see, e.g, Kim, et al. (1997) Mol. Cell Biol. 17, 2266-2278, Li, et al, (1996) J. Cell Biol. 132, 849-859; and Moessler, et al. (1996) Development 122, 2415-2425).

[0488] Photoreceptor-specific spatially restricted promoters include, but are not limited to, a rhodopsin promoter, a rhodopsin kinase promoter (Young et al (2003) Ophthalmol Vis. Sci 44:4076); a beta phosphodiesterase gene promoter (Nicoud et al. (2007) J. Gene Med. 9:1015); a retinitis pigmentosa gene promoter (Nicoud et al (2007) supra); an interphotoreceptor retinoid-binding protein (IRBP) gene enhancer (Nicoud et al. (2007) supra); an IRBP gene promoter (Yokoyama et al. (1992) Exp Eye Res. 55:225); and the like.

[0489] Nonlimiting Exemplary Cells-Specific Promoters

[0490] Cell-specific promoters known in the art may be used to direct expression of a Gene Writer protein, e.g, as described herein. Nonlimiting exemplary mammalian cell-specific promoters have been characterized and used in mice expressing Cre recombinase in a cell-specific manner. Certain nonlimiting exemplary mammalian cell-specific promoters are listed in Table 1 of U.S. Pat. No. 9,845,481, incorporated herein by reference.

[0491] In some embodiments, a cell-specific promoters is a promoter that is active in plants. Many exemplary cell-specific plant promoters are known in the art See, e.g., U.S. Pat. Nos. 5,097,025; 5,783,393; 5,880,330; 5,981,727; 7,557,264; 6,291,666; 7,132,526; and 7,323,622; and U.S. Publication Nos. 2010/0269226; 2007/0180580, 2005/0034192; and 2005/0086712, which are incorporated by reference herein in their entireties for any purpose.

[0492] In some embodiments, a vector as described herein comprises an expression cassette. The term “expression cassette”, as used herein, refers to a nucleic acid construct comprising nucleic acid elements sufficient for the expression of the nucleic acid molecule of the instant invention. Typically, an expression cassette comprises the nucleic acid molecule of the instant invention operatively linked to a promoter sequence. The term“operatively linked” refers to the association of two or more nucleic acid fragments on a single nucleic acid fragment so that the function of one is affected by the other. For example, a promoter is operatively linked with a coding sequence when it is capable of affecting the expression of that coding sequence (e.g., the coding sequence is under the transcriptional control of the promoter). Encoding sequences can be operatively linked to regulatory sequences in sense or antisense orientation. In certain embodiments, the promoter is a heterologous promoter. The term“heterologous promoter”, as used herein, refers to a promoter that is not found to be operatively linked to a given encoding sequence in nature. In certain embodiments, an expression cassette may comprise additional elements, for example, an intron, an enhancer, a polyadenylation site, a woodchuck response element (WRE), and/or other elements known to affect expression levels of the encoding sequenceA“promoter” typically controls the expression of a coding sequence or functional RNA. In certain embodiments, a promoter sequence comprises proximal and more distal upstream elements and can further comprise an enhancer element. An “enhancer” can typically stimulate promoter activity and may be an innate element of the promoter or a heterologous element inserted to enhance the level or tissue-specificity of a promoter. In certain embodiments, the promoter is derived in its entirety from a native gene. In certain embodiments, the promoter is composed of different elements derived from different naturally occurring promoters. In certain embodiments, the promoter comprises a synthetic nucleotide sequence. It will be understood by those skilled in the art that different promoters will direct the expression of a gene in different tissues or cell types, or at different stages of development, or in response to different environmental conditions or to the presence or the absence of a drug or transcriptional co-factor. Ubiquitous, cell-type-specific, tissue-specific, developmental stage-specific, and conditional promoters, for example, drug-responsive promoters (e.g., tetracycline-responsive promoters) are well known to those of skill in the art Examples of promoter include, but are not limited to, the phosphoglycerate kinase (PKG) promoter, CAG (composite of the CMV enhancer the chicken beta actin promoter (CBA) and the rabbit beta globin intron), NSE (neuronal specific enolase), synapsin or NeuN promoters, the SV40 early promoter, mouse mammary tumor virus LTR promoter; adenovirus major late promoter (Ad MLP): a herpes simplex virus (HSV) promoter, a cytomegalovirus (CMV) promoter such as the CMV immediate early promoter region (CMVIE), SFFV promoter, rous sarcoma virus (RSV) promoter, synthetic promoters, hybrid promoters, and the like Other promoters can be of human origin or from other species, including from mice. Common promoters include, e.g., the human cytomegalovirus (CMV) immediate early gene promoter, the SV40 early promoter, the Rous sarcoma virus long terminal repeat, [beta]-actin, rat insulin promoter, the phosphoglycerate kinase promoter, the human alpha-1 antitrypsin (hAAT) promoter, the transthyretin promoter, the TBG promoter and other liver-specific promoters, the desmin promoter and similar muscle-specific promoters, the EF1-alpha promoter, the CAG promoter and other constitutive promoters, hybrid promoters with multi-tissue specificity, promoters specific for neurons like synapsin and glyceraldehyde-3-phosphate dehydrogenase promoter, all of which are promoters well known and readily available to those of skill in the art, can be used to obtain high-level expression of the coding sequence of interest. In addition, sequences derived from non-viral genes, such as the murine metallothionein gene, will also find use herein. Such promoter sequences are commercially available from, e.g., Stratagene (San Diego, Calif.). Additional exemplary promoter sequences are described, for example, in WO2018213786A1 (incorporated by reference herein in its entirety).

[0493] In some embodiments, the apolipoprotein E enhancer (ApoE) or a functional fragment thereof is used, e.g., to drive expression in the liver. In some embodiments, two copies of the ApoE enhancer or a functional fragment thereof is used. In some embodiments, the ApoE enhancer or functional fragment thereof is used in combination with a promoter, e.g., the human alpha-1 antitrypsin (hAAT) promoter.

[0494] In some embodiments, the regulatory sequences impart tissue-specific gene expression capabilities. In some cases, the tissue-specific regulatory sequences bind tissue-specific transcription factors that induce transcription in a tissue specific manner. Various tissue-specific regulatory sequences (e.g., promoters, enhancers, etc.) are known in the art. Exemplary tissue-specific regulatory sequences include, but are not limited to, the following tissue-specific promoters: a liver-specific thyroxin binding globulin (TBG) promoter, a insulin promoter, a glucagon promoter, a somatostatin promoter, a pancreatic polypeptide (PPY) promoter, a synapsin-1 (Syn) promoter, a creatine kinase (MCK) promoter, a mammalian desmin (DES) promoter, a α-myosin heavy chain (a-MHC) promoter, or a cardiac Troponin T (cTnT) promoter. Other exemplary promoters include Beta-actin promoter, hepatitis B virus core promoter, Sandig et al., Gene Ther., 3:1002-9 (1996); alpha-fetoprotein (AFP) promoter, Arbuthnot et al., Hum. Gene Ther., 7.1503-14 (1996)), bone osteocalcin promoter (Stein et al., Mol. Biol. Rep., 24.185-96 (1997)); bone sialoprotein promoter (Chen et al., J. Bone Miner. Res., 11:654-64 (1996)), CD2 promoter (Hansal et al, J. Immunol, 161:1063-8 (1998); immunoglobulin heavy chain promoter: T cell receptor α-chain promoter, neuronal such as neuron-specific enolase (NSE) promoter (Andersen et al., Cell. Mol. Neurobiol., 13:503-15 (1993)), neurofilament light-chain gene promoter (Piccioli et al., Proc. Natl. Acad. Sci. USA, 88:5611-5 (1991)), and the neuron-specific vgf gene promoter (Piccioli et al., Neuron, 15.373-84 (1995)), and others Additional exemplary promoter sequences are described, for example, in U.S. patent Ser. No. 10/300,146 (incorporated herein by reference in its entirety). In some embodiments, a tissue-specific regulatory element, e.g., a tissue-specific promoter, is selected from one known to be operably linked to a gene that is highly expressed in a given tissue, e.g., as measured by RNA-seq or protein expression data, or a combination thereof. Methods for analyzing tissue specificity by expression are taught in Fagerberg et al. Mol Cell Proteomics 13(2):397-406 (2014), which is incorporated herein by reference in its entirety.

[0495] In some embodiments, a vector described herein is a multicistronic expression construct. Multicistronic expression constructs include, for example, constructs harboring a first expression cassette, e.g comprising a first promoter and a first encoding nucleic acid sequence, and a second expression cassette, e.g. comprising a second promoter and a second encoding nucleic acid sequence. Such multicistronic expression constructs may, in some instances, be particularly useful in the delivery of non-translated gene products, such as hairpin RNAs, together with a polypeptide, for example, a gene writer and gene writer template. In some embodiments, multicistronic expression constructs may exhibit reduced expression levels of one or more of the included transgenes, for example, because of promoter interference or the presence of incompatible nucleic acid elements in close proximity. If a multicistronic expression construct is part of a viral vector, the presence of a self-complementary nucleic acid sequence may, in some instances, interfere with the formation of structures necessary for viral reproduction or packaging.

[0496] In some embodiments, the sequence encodes an RNA with a hairpin. In some embodiments, the hairpin RNA is an a guide RNA, a template RNA, shRNA, or a microRNA. In some embodiments, the first promoter is an RNA polymerase I promoter. In some embodiments, the first promoter is an RNA polymerase II promoter. In some embodiments, the second promoter is an RNA polymerase III promoter. In some embodiments, the second promoter is a U6 or H1 promoter. In some embodiments, the nucleic acid construct comprises the structure of AAV construct B1 or B2.

[0497] Without wishing to be bound by theory, multicistronic expression constructs may not achieve optimal expression levels as compared to expression systems containing only one cistron. One of the suggested causes of lower expression levels achieved with multicistronic expression constructs comprising two ore more promoter elements is the phenomenon of promoter interference (see, e.g., Curtin J A, Dane A P, Swanson A, Alexander I E, Ginn S L. Bidirectional promoter interference between two widely used internal heterologous promoters in a late-generation lentiviral construct. Gene Ther. 2008 March; 15(5):384-90; and Martin-Duque P, Jezzard S, Katlansis L, Vassaux G. Direct comparison of the insulating properties of two genetic elements in an adenoviral vector containing two different expression cassettes. Hum Gene Ther. 2004 October; 15(10):995-1002; both references incorporated herein by reference for disclosure of promoter interference phenomenon). In some embodiments, the problem of promoter interference may be overcome, e.g., by producing multicistronic expression constructs comprising only one promoter driving transcription of multiple encoding nucleic acid sequences separated by internal ribosomal entry sites, or by separating cistrons comprising their own promoter with transcriptional insulator elements. In some embodiments, single-promoter driven expression of multiple cistrons may result in uneven expression levels of the cistrons. In some embodiments, a promoter cannot efficiently be isolated and isolation elements may not be compatible with some gene transfer vectors, for example, some retroviral vectors.

[0498] MicroRNAs

[0499] miRNAs and other small interfering nucleic acids generally regulate gene expression via target RNA transcript cleavage/degradation or translational repression of the target messenger RNA (mRNA) miRNAs may, in some instances, be natively expressed, typically as final 19-25 non-translated RNA products. miRNAs generally exhibit their activity through sequence-specific interactions with the 3′ untranslated regions (UTR) of target mRNAs. These endogenously expressed miRNAs may form hairpin precursors that are subsequently processed into an miRNA duplex, and further into a mature single stranded miRNA molecule. This mature miRNA generally guides a multiprotein complex, miRISC, which identifies target 3′ UTR regions of target mRNAs based upon their complementarity to the mature miRNA. Useful transgene products may include, for example, miRNAs or miRNA binding sites that regulate the expression of a linked polypeptide. A non-limiting list of miRNA genes; the products of these genes and their homologues are useful as transgenes or as targets for small interfering nucleic acids (e.g., miRNA sponges, antisense oligonucleotides), e.g., in methods such as those listed in U.S. Ser. No. 10/300,146, 22:25-25:48, incorporated by reference. In some embodiments, one or more binding sites for one or more of the foregoing miRNAs are incorporated in a transgene, e.g., a transgene delivered by a rAAV vector, e.g., to inhibit the expression of the transgene in one or more tissues of an animal harboring the transgene. In some embodiments, a binding site may be selected to control the expression of a trangene in a tissue specific manner. For example, binding sites for the liver-specific miR-122 may be incorporated into a transgene to inhibit expression of that transgene in the liver. Additional exemplary miRNA sequences are described, for example, in U.S. patent Ser. No. 10/300,146 (incorporated herein by reference in its entirety).

[0500] For liver-specific Gene Writing, however, overexpression of miR-122 may be utilized instead of using binding sites to effect miR-122-specific degradation. This miRNA is positively associated with hepatic differentiation and maturation, as well as enhanced expression of liver specific genes. Thus, in some embodiments, the coding sequence for miR-122 may be added to a component of a Gene Writing system to enhance a liver-directed therapy.

[0501] A miR inhibitor or miRNA inhibitor is generally an agent that blocks miRNA expression and/or processing. Examples of such agents include, but are not limited to, microRNA antagonists, microRNA specific antisense, microRNA sponges, and microRNA oligonucleotides (double-stranded, hairpin, short oligonucleotides) that inhibit miRNA interaction with a Drosha complex. MicroRNA inhibitors, e.g., miRNA sponges, can be expressed in cells from transgenes (e.g., as described in Ebert, M S. Nature Methods, Epub Aug. 12, 2007; incorporated by reference herein in its entirety). In some embodiments, microRNA sponges, or other miR inhibitors, are used with the AAVs. microRNA sponges generally specifically inhibit miRNAs through a complementary heptameric seed sequence. In some embodiments, an entire family of miRNAs can be silenced using a single sponge sequence. Other methods for silencing miRNA function (derepression of miRNA targets) in cells will be apparent to one of ordinary skill in the art.

[0502] In some embodiments, a miRNA as described herein comprises a sequence listed in Table 4 of PCT Publication No. WO2020014209, incorporated herein by reference. Also incorporated herein by reference are the listing of exemplary miRNA sequences from WO2020014209.

[0503] In some embodiments, it is advantageous to silence one or more components of a Gene Writing system (e.g., mRNA encoding a Gene Writer polypeptide, a Gene Writer Template RNA, or a heterologous object sequence expressed from the genome after successful Gene Writing) in a portion of cells. In some embodiments, it is advantageous to restrict expression of a component of a Gene Writing system to select cell types within a tissue of interest.

[0504] For example, it is known that in a given tissue, e.g., liver, macrophages and immune cells, e.g., Kupffer cells in the liver, may engage in uptake of a delivery vehicle for one or more components of a Gene Writing system. In some embodiments, at least one binding site for at least one miRNA highly expressed in macrophages and immune cells, e.g., Kupffer cells, is included in at least one component of a Gene Writing system, e.g., nucleic acid encoding a Gene Writing polypeptide or a transgene. In some embodiments, a miRNA that targets the one or more binding sites is listed in a table referenced herein, e.g., miR-142, e.g., mature miRNA hsa-miR-142-5p or hsa-miR-142-3p.

[0505] In some embodiments, there may be a benefit to decreasing Gene Writer levels and/or Gene Writer activity in cells in which Gene Writer expression or overexpression of a transgene may have a toxic effect. For example, it has been shown that delivery of a transgene overexpression cassette to dorsal root ganglion neurons may result in toxicity of a gene therapy (see Hordeaux et al Sci Transl Med 12(569):eaba9188 (2020), incorporated herein by reference in its entirety). In some embodiments, at least one miRNA binding site may be incorporated into a nucleic acid component of a Gene Writing system to reduce expression of a system component in a neuron, e.g., a dorsal root ganglion neuron. In some embodiments, the at least one miRNA binding site incorporated into a nucleic acid component of a Gene Writing system to reduce expression of a system component in a neuron is a binding site of miR-182, e.g., mature miRNA hsa-miR-182-5p or hsa-miR-182-3p. In some embodiments, the at least one miRNA binding site incorporated into a nucleic acid component of a Gene Writing system to reduce expression of a system component in a neuron is a binding site of miR-183, e.g., mature miRNA hsa-miR-183-5p or hsa-miR-183-3p. In some embodiments, combinations of miRNA binding sites may be used to enhance the restriction of expression of one or more components of a Gene Writing system to a tissue or cell type of interest.

[0506] Table A5 below provides exemplary miRNAs and corresponding expressing cells, e.g., a miRNA for which one can, in some embodiments, incorporate binding sites (complementary sequences) in the transgene or polypeptide nucleic acid, e.g., to decrease expression in that off-target cell.

TABLE A5
Exemplary miRNA from off-target
cells and tissues

| Silenced | | | | SEQ |
|---|---|---|---|---|
| cell | miRNA | | | ID |
| type | name | Mature miRNA | miRNA sequence | NO |
| Kupffer | miR-142 | hsa-miR-142-5p | cauaaaguagaaag | 481 |
| cells | | | cacuacu | |
| Kupffer | miR-142 | hsa-miR-142-3p | uguaguguuuccua | 482 |
| cells | | | cuuuaugga | |
| Dorsal | miR-182 | hsa-miR-182-5p | uuuggcaaugguag | 483 |
| root | | | aacucacacu | |
| ganglion | | | | |
| neurons | | | | |
| Dorsal | miR-182 | hsa-miR-182-3p | ugguucuagacuug | 484 |
| root | | | ccaacua | |
| ganglion | | | | |
| neurons | | | | |
| Dorsal | miR-183 | hsa-miR-183-5p | uauggcacugguag | 485 |
| root | | | aauucacu | |
| ganglion | | | | |
| neurons | | | | |
| Dorsal | miR-183 | hsa-miR-183-3p | gugaauuaccgaag | 486 |
| root | | | ggccauaa | |
| ganglion | | | | |
| neurons | | | | |
| Hepato- | miR-122 | hsa-miR-122-5p | uggagugugacaau | 2010 |
| cytes | | | gguguuug | |
| Hepato- | miR-122 | hsa-miR-122-3p | aacgccauuaucac | 2011 |
| cytes | | | acuaaaua | |

[0507] Anticrispr Systems for Regulating GeneWriter Activity

[0508] Various approaches for modulating Cas molecule activity may be used in conjunction with the systems and methods described herein. For instance, in some embodiments, a polypeptide described herein (e.g., a Cas molecule or a GeneWriter comprising a Cas domain) can be regulated using an anticrispr agent (e.g., an anticrispr protein or anticrispr small molecule). In some embodiments, the Cas molecule or Cas domain comprises a responsive intein such as, for example, a 4-hydroxytamoxifen (4-HT)-responsive intein, an iCas molecule (e.g., iCas9); a 4-HT-responsive Cas (e.g., allosterically regulated Cas9 (arC9) or dead Cas9 (dC9)). The systems and methods described herein can also utilize a chemically-induced dimerization system of split protein fragments (e.g., rapamycin-mediated dimerization of FK506 binding protein 12 (FKBP) and FKBP rapamycin binding domain (FRB), an abscisic acid-inducible ABI-PYL1 and gibberellin-inducible GID1-GAI heterodimerization domains); a dimer of BCL-xL peptide and BH3 peptides, a A385358 (A3) small molecule, a degron system (e.g., a FKBP-Cas9 destabilized system, an auxin-inducible degron (AID) or an E. coli DHFR degron system), an aptamer or aptazyme fused with gRNA (e.g., tetracycline- and theophylline-responsive bioswitches), AcrIIA2 and AcrIIA4 proteins, and BRD0539.

[0509] In some embodiments, a small molecule-responsive intein (e.g., 4-hydroxytamoxifen (4-HT)-responsive intein) is inserted at specific sites within a Cas molecule (e.g., Cas9). In some embodiments, the insertion of a 4HT-responsive intein disrupts Cas9 enzymatic activity. In some embodiments, a Cas molecule (e.g., iCas9) is fused to the hormone binding domain of the estrogen receptor (ERT2). In some embodiments, the ligand binding domain of the human estrogen receptor-α can be inserted into a Cas molecule (e.g., Cas9 or dead Cas9 (dC9)), e.g., at position 231, yielding a 4HT-responsive anticrispr Cas9 (e.g., arC9 or dC9). In some embodiments, dCas9 can provide 4-HT dose-dependent repression of Cas9 function. In some embodiments, arC9 can provide 4-HT dose-dependent control of Cas9 function. In some embodiments, a Cas molecule (e.g., Cas9) is fused to split protein fragments. In some embodiments, chemically-induced dimerization of split protein fragments (e.g., rapamycin-mediated dimerization of FK506 binding protein 12 (FKBP) and FKBP rapamycin binding domain (FRB)) can induce low levels of Cas9 molecule activity. In some embodiments, a chemically-induced dimerization system (e.g., abscisic acid-inducible ABI-PYL1 and gibberellin-inducible GID1-GAI heterodimerization domains) can induce a dose-dependent and reversible transcriptional activation/repression of Cas9. In some embodiments, a Cas9 inducible system (ciCas9) comprises the replacement of a Cas molecule (e.g., Cas9) REC2 domain with a BCL-xl peptide and attachment of a BH3 peptide to the N- and C-termini of the modified Cas9.BCL. In some embodiments, the interaction between BCL-xL and BH3 peptides can keep Cas9 in an inactive state. In some embodiments, a small molecule (e.g., A-385358 (A3)) can disrupt the interaction between BLC-xl and BH3 peptides to activate Cas9. In some embodiments, a Cas9 inducible system can exhibit dose-dependent control of nuclease activity. In some embodiments, a degron system can induce degradation of a Cas molecule (e.g., Cas9) upon activation or deactivation by an external factor (e.g., small-molecule ligand, light, temperature, or a protein). In some embodiments, a small molecule BRD0539 inhibits a Cas molecule (e.g., Cas9) reversibly. Additional information on anticrispr proteins or anticrispr small molecules can be found, for example, in Gangopadhyay, S. A. et al. Precision control of CRISPR-Cas9 using small molecules and light, Biochemistry, 2019, Maji, B. et al. A high-throughput platform to identify small molecule inhibitors of CRISPR-Cas9, and Pawluk Anti-CRISPR: discovery, mechanism and function Nature Reviews Microbiology volume 16, pages 12-17(2018), each of which is incorporated by reference in its entirety.

[0510] Self-Inactivating Modules for Regulating GeneWriter Activity

[0511] In some embodiments the Gene Writer systems described herein includes a self-inactivating module. The self-inactivating module leads to a decrease of expression of the Gene Writer polypeptide, the Gene Writer template, or both. Without wishing to be bound by the theory, the self-inactivating module provides for a temporary period of Gene Writer expression prior to inactivation. Without wishing to be bound by theory, the activity of the Gene Writer polypeptide at a target site introduces a mutation (e.g. a substitution, insertion, or deletion) into the DNA encoding the Gene Writer polypeptide or Gene Writer template which results in a decrease of Gene Writer polypeptide or template expression. In some embodiments of the self-inactivating module, a target site for the Gene Writer polypeptide is included in the DNA encoding the Gene Writer polypeptide or Gene Writer template. In some embodiments, one, two, three, four, five, or more copies of the target site are included in the DNA encoding the Gene Writer polypeptide or Gene Writer template. In some embodiments, the target site in the DNA encoding the Gene Writer polypeptide or Gene Writer template is the same target site as the target site on the genome. In some embodiments, the target site is a different target site than the target site on the genome. In some embodiments, the self-inactivation module target site uses the same or a different template RNA or guide RNA as the genome target site. In some embodiments, the target site is modified via target primed reverse transcription based upon a template RNA. In some embodiments the target side is nicked. The target site may be incorporated into an enhancer, a promoter, an untranslated region, an exon, an intron, an open reading frame, or a stuffer sequence.

[0512] In some embodiments, upon inactivation, the decrease of expression is 25%, 50%, 60%, 70%, 80%, 90%, 95%, 99%, 99.9%, or more lower than a Gene Writing system that does not contain the self-inactivating module. In some embodiments, a Gene Writer system that contains the self-inactivating module has a 5%, 10%, 15%, 20%, 25%, 30%, 40%, 50%, 60%, 70%, 80%, 90%, 95% 99%, or higher rate of integrations in target sites than off-target sites compared to a Gene Writing system that does not contain the self-inactivation module. a Gene Writer system that contains the self-inactivating module has a 10%, 15%, 20%, 25%, 30%, 40%, 50%, 60%, 70%, 80%, 90%, 95% 99%, or higher efficiency of target site modification compared to a Gene Writing system that does not contain the self-inactivation module. In some embodiments, the self-inactivating module is included when the Gene Writer polypeptide is delivered as DNA, e.g. via a viral vector.

[0513] Self-inactivating modules have been described for nucleases. See, e.g. in Li et al A Self-Deleting AAV-CRISPR System for In Vivo Genome Editing, Mol Ther Methods Clin Dev. 2019 Mar. 15; 12: 111-122, P. Singhal, Self-Inactivating Cas9: a method for reducing exposure while maintaining efficacy in virally delivered Cas9 applications (available at www.editasmedicine.com/wp-content/uploads/2019/10/aef asgct_poster_2017_final_-_present_5-11-17_515 pm1_1494537387_1494558495_1497467403.pdf), and Epstein and Schaffer Engineering a Self-Inactivating CRISPR System for AAV Vectors Targeted Genome Editing I|Volume 24, SUPPLEMENT 1, S50, May 1, 2016, and WO2018106693A1.

[0514] Small Molecules

[0515] In some embodiments a polypeptide described herein (e.g., a Gene Writer polypeptide) is controllable via a small molecule. In some embodiments the polypeptide is dimerized via a small molecule.

[0516] In some embodiment, the polypeptide is controllable via Chemical Induction of Dimerization (CID) with small molecules. CID is generally used to generate switches of protein function to alter cell physiology. An exemplary high specificity, efficient dimerizer is rimiducid (AP1903), which has two identical, protein-binding surfaces arranged tail-to-tail, each with high affinity and specificity for a mutant of FKBP12: FKBP12(F36V) (FKBP12v36, F_{V36} or F_{V}), Attachment of one or more F_{V} domains onto one or more cell signaling molecules that normally rely on homodimerization can convert that protein to rimiducid control. Homodimerization with rimiducid is used in the context of an inducible caspase safety switch. This molecular switch that is controlled by a distinct dimerizer ligand, based on the heterodimerizing small molecule, rapamycin, or rapamycin analogs (“rapalogs”). Rapamycin binds to FKBP12, and its variants, and can induce heterodimerization of signaling domains that are fused to FKBP12 by binding to both FKBP12 and to polypeptides that contain the FKBP-rapamycin-binding (FRB) domain of mTOR. Provided in some embodiments of the present application are molecular switches that greatly augment the use of rapamycin, rapalogs and rimiducid as agents for therapeutic applications.

[0517] In some embodiments of the dual switch technology, a homodimerizer, such as AP1903 (rimiducid), directly induces dimerization or multimerization of polypeptides comprising an FKBP12 multimerizing region. In other embodiments, a polypeptide comprising an FKBP12 multimerization is multimerized, or aggregated by binding to a heterodimerizer, such as rapamycin or a rapalog, which also binds to an FRB or FRB variant multimerizing region on a chimeric polypeptide, also expressed in the modified cell, such as, for example, a chimeric antigen receptor. Rapamycin is a natural product macrolide that binds with high affinity (<1 nM) to FKBP12 and together initiates the high-affinity, inhibitory interaction with the FKBP-Rapamycin-Binding (FRB) domain of mTOR. FRB is small (89 amino acids) and can thereby be used as a protein “tag” or “handle” when appended to many proteins. Coexpression of a FRB-fused protein with a FKBP12-fused protein renders their approximation rapamycin-inducible (12-16). This can serve as the basis for a cell safety switch regulated by the orally available ligand, rapamycin, or derivatives of rapamycin (rapalogs) that do not inhibit mTOR at a low, therapeutic dose but instead bind with selected, Caspase-9-fused mutant FRB domains. (see Sabatini D M, et al., Cell. 1994; 78(1):35-43; Brown E J, et al., Nature. 1994; 369(6483):756-8, Chen J, et al., Proc Natl Acad Sci USA. 1995; 92(11):4947-51; and Choi J, Science. 1996; 273(5272):239-42).

[0518] In some embodiments, two levels of control are provided in the therapeutic cells. In embodiments, the first level of control may be tunable, i.e., the level of removal of the therapeutic cells may be controlled so that it results in partial removal of the therapeutic cells. In some embodiments, the chimeric antigen polypeptide comprises a binding site for rapamycin, or a rapamycin analog. In embodiments, also present in the therapeutic cell is a suicide gene, such as, for example, one encoding a caspase polypeptide. Using this controllable first level, the need for continued therapy may, in some embodiments, be balanced with the need to eliminate or reduce the level of negative side effects. In some embodiments, a rapamycin analog, a rapalog is administered to the patient, which then binds to both the caspase polypeptide and the chimeric antigen receptor, thus recruiting the caspase polypeptide to the location of the CAR, and aggregating the caspase polypeptide. Upon aggregation, the caspase polypeptide induces apoptosis. The amount of rapamycin or rapamycin analog administered to the patient may vary, if the removal of a lower level of cells by apoptosis is desired in order to reduce side effects and continue CAR therapy, a lower level of rapamycin or rapamycin may be administered to the patient. In some embodiments, the second level of control may be designed to achieve the maximum level of cell elimination. This second level may be based, for example, on the use of rimiducid, or AP1903. If there is a need to rapidly eliminate up to 100% of the therapeutic cells, the AP1903 may be administered to the patient. The multimeric AP1903 binds to the caspase polypeptide, leading to multimerization of the caspase polypeptide and apoptosis. In certain examples, second level may also be tunable, or controlled, by the level of AP1903 administered to the subject.

[0519] In certain embodiments, small molecules can be used to control genes, as described in for example, U.S. Ser. No. 10/584,351 at 47:53-56:47 (incorporated by reference herein in its entirety), together suitable ligands for the control features, e.g., in U.S. Ser. No. 10/584,351 at 56:48, et seq. as well as U10046049 at 43:27-52:20, incorporated by reference as well as the description of ligands for such control systems at 52:21, et seq.

[0520] Chemically Modified Nucleic Acids and Nucleic Acid End Features

[0521] A nucleic acid described herein (e.g., a template nucleic acid, e.g., a template RNA; or a nucleic acid (e.g., mRNA) encoding a GeneWriter) can comprise unmodified or modified nucleobases. Naturally occurring RNAs are synthesized from four basic ribonucleotides: ATP, CTP, UTP and GTP, but may contain post-transcriptionally modified nucleotides. Further, approximately one hundred different nucleoside modifications have been identified in RNA (Rozenski, J, Crain, P, and McCloskey, J. (1999). The RNA Modification Database: 1999 update. Nucl Acids Res 27: 196-197). An RNA can also comprise wholly synthetic nucleotides that do not occur in nature.

[0522] In some embodiments, the chemically modification is one provided in PCT/US2016/032454, US Pat. Pub. No. 20090286852, of International Application No. WO/2012/019168, WO/2012/045075, WO/2012/135805, WO/2012/158736, WO/2013/039857, WO/2013/039861, WO/2013/052523, WO/2013/090648, WO/2013/096709, WO/2013/101690, WO/2013/106496, WO/2013/130161, WO/2013/151669, WO/2013/151736, WO/2013/151672, WO/2013/151664, WO/2013/151665, WO/2013/151668, WO/2013/151671, WO/2013/151667, WO/2013/151670, WO/2013/151666, WO/2013/151663, WO/2014/028429, WO/2014/081507, WO/2014/093924, WO/2014/093574, WO/2014/113089, WO/2014/144711, WO/2014/144767, WO/2014/144039, WO/2014/152540, WO/2014/152030, WO/2014/152031, WO/2014/152027, WO/2014/152211, WO/2014/158795, WO/2014/159813, WO/2014/164253, WO/2015/006747, WO/2015/034928, WO/2015/034925, WO/2015/038892, WO/2015/048744, WO/2015/051214, WO/2015/051173, WO/2015/051169, WO/2015/058069, WO/2015/085318, WO/2015/089511, WO/2015/105926, WO/2015/164674, WO/2015/196130, WO/2015/196128, WO/2015/196118, WO/2016/011226, WO/2016/011222, WO/2016/011306, WO/2016/014846, WO/2016/022914, WO/2016/036902, WO/2016/077125, or WO/2016/077123, each of which is herein incorporated by reference in its entirety. It is understood that incorporation of a chemically modified nucleotide into a polynucleotide can result in the modification being incorporated into a nucleobase, the backbone, or both, depending on the location of the modification in the nucleotide. In some embodiments, the backbone modification is one provided in EP 2813570, which is herein incorporated by reference in its entirety. In some embodiments, the modified cap is one provided in US Pat. Pub. No. 20050287539, which is herein incorporated by reference in its entirety.

[0523] In some embodiments, the chemically modified nucleic acid (e.g., RNA, e.g., mRNA) comprises one or more of ARCA: anti-reverse cap analog (m27.3′-OGP3G), GP3G (Unmethylated Cap Analog), m7GP3G (Monomethylated Cap Analog), m32.2.7GP3G (Trimethylated Cap Analog), m5CTP (5′-methyl-cytidine triphosphate), m6ATP (N6-methyl-adenosine-5′-triphosphate), s2UTP (2-thio-uridine triphosphate), and ψ (pseudouridine triphosphate).

[0524] In some embodiments, the chemically modified nucleic acid comprises a 5′ cap, e.g.: a 7-methylguanosine cap (e.g., a O-Me-m7G cap); a hypermethylated cap analog; an NAD+-derived cap analog (e.g., as described in Kiledjian, Trends in Cell Biology 28, 454-464 (2018)); or a modified, e.g., biotinylated, cap analog (e.g., as described in Bednarek et al., Phil Trans R Soc B 373, 20180167 (2018)).

[0525] In some embodiments, the chemically modified nucleic acid comprises a 3′ feature selected from one or more of: a polyA tail; a 16-nucleotide long stem-loop structure flanked by unpaired 5 nucleotides (e.g., as described by Mannironi et al., Nucleic Acid Research 17, 9113-9126 (1989)); a triple-helical structure (e.g., as described by Brown et al., PNAS 109, 19202-19207 (2012)); a tRNA, Y RNA, or vault RNA structure (e.g., as described by Labno et al., Biochemica et Biophysica Acta 1863, 3125-3147 (2016)); incorporation of one or more deoxyribonucleotide triphosphates (dNTPs), 2′O-Methylated NTPs, or phosphorothioate-NTPs; a single nucleotide chemical modification (e.g., oxidation of the 3′ terminal ribose to a reactive aldehyde followed by conjugation of the aldehyde-reactive modified nucleotide); or chemical ligation to another nucleic acid molecule.

[0526] In some embodiments, the the nucleic acid (e.g., template nucleic acid) comprises one or more modified nucleotides, e.g., selected from dihydrouridine, inosine, 7-methylguanosine, 5-methylcytidine (5mC), 5′ Phosphate ribothymidine, 2′-O-methyl ribothymidine, 2′-O-ethyl ribothymidine, 2′-fluoro ribothymidine, C-5 propynyl-deoxycytidine (pdC), C-5 propynyl-deoxyuridine (pdU), C-5 propynyl-cytidine (pC), C-5 propynyl-uridine (pU), 5-methyl cytidine, 5-methyl uridine, 5-methyl deoxycytidine, 5-methyl deoxyuridine methoxy, 2,6-diaminopurine, 5′-Dimethoxytrityl-N4-ethyl-2′-deoxycytidine, C-5 propynyl-f-cytidine (pfC), C-5 propynyl-f-uridine (pfU), 5-methyl f-cytidine, 5-methyl f-uridine, C-5 propynyl-m-cytidine (pmC), C-5 propynyl-f-uridine (pmU), 5-methyl m-cytidine, 5-methyl m-uridine, LNA (locked nucleic acid), MGB (minor groove binder) pseudouridine (Ψ), 1-N-methylpseudouridine (1-Me-Ψ), or 5-methoxyuridine (5-MO-U).

[0527] In some embodiments, the nucleic acid comprises a backbone modification, e.g., a modification to a sugar or phosphate group in the backbone. In some embodiments, the nucleic acid comprises a nucleobase modification.

[0528] In some embodiments, the nucleic acid comprises one or more chemically modified nucleotides of Table 6, one or more chemical backbone modifications of Table 7, one or more chemically modified caps of Table 8. For instance, in some embodiments, the nucleic acid comprises two or more (e.g., 3, 4, 5, 6, 7, 8, 9, or 10 or more) different types of chemical modifications. As an example, the nucleic acid may comprise two or more (e.g., 3, 4, 5, 6, 7, 8, 9, or 10 or more) different types of modified nucleobases, e.g., as described herein, e.g., in Table 6. Alternatively or in combination, the nucleic acid may comprise two or more (e.g., 3, 4, 5, 6, 7, 8, 9, or 10 or more) different types of backbone modifications, e.g., as described herein, e.g., in Table 7. Alternatively or in combination, the nucleic acid may comprise one or more modified cap, e.g., as described herein, e.g., in Table 8. For instance, in some embodiments, the nucleic acid comprises one or more type of modified nucleobase and one or more type of backbone modification; one or more type of modified nucleobase and one or more modified cap; one or more type of modified cap and one or more type of backbone modification; or one or more type of modified nucleobase, one or more type of backbone modification, and one or more type of modified cap.

[0529] In some embodiments, the nucleic acid comprises one or more (e.g., 2, 3, 4, 5, 6, 7, 8, 9, 10, 20, 30, 40, 50, 60, 70, 80, 90, 100, 150, 200, 250, 300, 350, 400, 450, 500, 600, 700, 800, 900, 1000, or more) modified nucleobases. In some embodiments, all nucleobases of the nucleic acid are modified. In some embodiments, the nucleic acid is modified at one or more (e.g., 2, 3, 4, 5, 6, 7, 8, 9, 10, 20, 30, 40, 50, 60, 70, 80, 90, 100, 150, 200, 250, 300, 350, 400, 450, 500, 600, 700, 800, 900, 1000, or more) positions in the backbone. In some embodiments, all backbone positions of the nucleic acid are modified.

TABLE 6
Modified nucleotides

| | |
|---|---|
| 5-aza-uridine | N2-methyl-6-thio-guanosine |
| 2-thio-5-aza-midine | N2,N2-dimethyl-6-thio-guanosine |
| 2-thiouridine | pyridin-4-one ribonucleoside |
| 4-thio-pseudouridine | 2-thio-5-aza-uridine |
| 2-thio-pseudouridine | 2-thiomidine |
| 5-hydroxyuridine | 4-thio-pseudomidine |
| 3-methyluridine | 2-thio-pseudowidine |
| 5-carboxymethyl-uridine | 3-methylmidine |
| 1-carboxymethyl-pseudouridine | l-propynyl-pseudomidine |
| 5-propynyl-uridine | l-methyl-1-deaza-pseudomidine |
| 1-propynyl-pseudouridine | 2-thio-1-methyl-1-deaza-pseudouridine |
| 5-taurinomethyluridine | 4-methoxy-pseudomidine |
| 1-taurinomethyl-pseudouridine | 5′-O-(1-Thiophosphate)-Adenosine |
| 5-taurinomethyl-2-thio-uridine | 5′-O-(1-Thiophosphate)-Cytidine |
| 1-taurinomethyl-4-thio-uridine | 5′-O-(1-thiophosphate)-Guanosine |
| 5-methyl-uridine | 5′-O-(1-Thiophophate)-Uridine |
| 1-methyl-pseudouridine | 5′-O-(1-Thiophosphate)-Pseudouridine |
| 4-thio-1-methyl-pseudouridine | 2′-O-methyl-Adenosine |
| 2-thio-1-methyl-pseudouridine | 2′-O-methyl-Cytidine |
| 1-methyl-1-deaza-pseudouridine | 2′-O-methyl-Guanosine |
| 2-thio-1-methyl-1-deaza-pseudomidine | 2′-O-methyl-Uridine |
| dihydrouridine | 2′-O-methyl-Pseudouridine |
| dihydropseudouridine | 2′-O-methyl-Inosine |
| 2-thio-dihydromidine | 2-methyladenosine |
| 2-thio-dihydropseudouridine | 2-methylthio-N6-methyladenosine |
| 2-methoxyuridine | 2-methylthio-N6 isopentenyladenosine |
| 2-methoxy-4-thio-uridine | 2-methylthio-N6-(cis- |
| 4-methoxy-pseudouridine | hydroxyisopentenyl)adenosine |
| 4-methoxy-2-thio-pseudouridine | N6-methyl-N6-threonylcarbamoyladenosine |
| 5-aza-cytidine | N6-hydroxynorvalylcarbamoyladenosine |
| pseudoisocytidine | 2-methylthio-N6-hydroxynorvalyl |
| 3-methyl-cytidine | carbamoyladenosine |
| N4-acetylcytidine | 2′-O-ribosyladenosine (phosphate) |
| 5-formylcytidine | 1,2′-O-dimethylinosine |
| N4-methylcytidine | 5,2′-O-dimethylcytidine |
| 5-hydroxymethylcytidine | N4-acetyl-2′-O-methylcytidine |
| 1-methyl-pseudoisocytidine | Lysidine |
| pyrrolo-cytidine | 7-methylguanosine |
| pyrrolo-pseudoisocytidine | N2,2′-O-dimethylguanosine |
| 2-thio-cytidine | N2,N2,2′-O-trimethylguanosine |
| 2-thio-5-methyl-cytidine | 2′-O-ribosylguanosine (phosphate) |
| 4-thio-pseudoisocytidine | Wybutosine |
| 4-thio-1-methyl-pseudoisocytidine | Peroxywybutosine |
| 4-thio-1-methyl-1-deaza-pseudoisocytidine | Hydroxywybutosine |
| 1-methyl-1-deaza-pseudoisocytidine | undermodified hydroxywybutosine |
| zebularine | methylwyosine |
| 5-aza-zebularine | queuosine |
| 5-methyl-zebularine | epoxy queuosine |
| 5-aza-2-thio-zebularine | galactosyl-queuosine |
| 2-thio-zebularine | mannosyl-queuosine |
| 2-methoxy-cytidine | 7-cyano-7-deazaguanosine |
| 2-methoxy-5-methyl-cytidine | 7-aminomethyl-7-deazaguanosine |
| 4-methoxy-pseudoisocytidine | archaeosine |
| 4-methoxy-1-methyl-pseudoisocytidine | 5,2′-O-dimethyluridine |
| 2-aminopurine | 4-thiouridine |
| 2,6-diaminopurine | 5-methyl-2-thiouridine |
| 7-deaza-adenine | 2-thio-2′-O-methyluridine |
| 7-deaza-8-aza-adenine | 3-(3-amino-3-carboxypropyl)uridine |
| 7-deaza-2-aminopurine | 5-methoxyuridine |
| 7-deaza-8-aza-2-aminopurine | uridine 5-oxyacetic acid |
| 7-deaza-2,6-diaminopurine | uridine 5-oxyacetic acid methyl ester |
| 7-deaza-8-aza-2,6-diarninopurine | 5-(carboxyhydroxymethyl)uridine) |
| 1-methyladenosine | 5-(carboxyhydroxymethyl)uridine methyl ester |
| N6-isopentenyladenosine | 5-methoxy carbonylmethyluridine |
| N6-(cis-hydroxyisopentenyl)adenosine | 5-methoxy carbonylmethyl-2′-O-methyluridine |
| 2-methylthio-N6-(cis-hydroxyisopentenyl) | 5-methoxy carbonylmethyl-2-thiouridine |
| adenosine | 5-aminomethyl-2-thiouridine |
| N6-glycinylcarbamoyladenosine | 5-methyl aminomethy luridine |
| N6-threonylcarbamoyladenosine | 5-methyl aminomethyl-2-thiouridine |
| 2-methylthio-N6-threonyl | 5-methyl aminomethyl-2-selenouridine |
| carbamoyladenosine | 5-carbamoylmethyluridine |
| N6,N6-dimethyladenosine | 5-carbamoylmethyl-2′-O-methyluridine |
| 7-methyladenine | 5-carboxymethylaminomethyluridine |
| 2-methylthio-adenine | 5-carboxymethylaminomethyl-2′-O- |
| 2-methoxy-adenine | methyluridine |
| inosine | 5-carboxymethylaminomethyl-2-thiouridine |
| 1-methyl-inosine | N4,2′-O-dimethylcytidine |
| wyosine | 5-carboxymethyluridine |
| wybutosine | N6,2′-O-dimethyladenosine |
| 7-deaza-guanosine | N,N6,O-2′-trimethyladenosine |
| 7-deaza-8-aza-guanosine | N2,7-dimethylguanosine |
| 6-thio-guanosine | N2,N2,7-trimethylguanosine |
| 6-thio-7-deaza-guanosine | 3,2′-O-dimethyluridine |
| 6-thio-7-deaza-8-aza-guanosine | 5-methyldihydrouridine |
| 7-methyl-guanosine | 5-formyl-2′-O-methylcytidine |
| 6-thio-7-methyl-guanosine | 1,2′-O-dimethylguanosine |
| 7-methylinosine | 4-demethylwyosine |
| 6-methoxy-guanosine | Isowyosine |
| 1-methylguanosine | N6-acetyladenosine |
| N2-methylguanosine | |
| N2,N2-dimethylguanosine | |
| 8-oxo-guanosine | |
| 7-methyl-8-oxo-guanosine | |
| 1-methyl-6-thio-guanosine | |

TABLE 7
Backbone modifications

2′-O-Methyl backbone
Peptide Nucleic Acid (PNA) backbone
phosphorothioate backbone
morpholino backbone
carbamate backbone
siloxane backbone
sulfide backbone
sulfoxide backbone
sulfone backbone
formacetyl backbone
thioformacetyl backbone
methyleneformacetyl backbone
riboacetyl backbone
alkene containing backbone
sulfamate backbone
sulfonate backbone
sulfonamide backbone
methyleneimino backbone
methylenehydrazino backbone
amide backbone

TABLE 8
Modified caps

m7GpppA
m7GpppC
m2,7GpppG
m2,2,7GpppG
m7Gpppm7G
m7,2′OmeGpppG
m72′dGpppG
m7,3′OmeGpppG
m7,3′dGpppG
GppppG
m7GppppG
m7GppppA
m7GppppC
m2,7GppppG
m2,2,7GppppG
m7Gppppm7G
m7,2′OmeGppppG
m72′dGppppG
m7,3′OmeGppppG
m7,3′dGppppG

### Production of Compositions and Systems

[0530] As will be appreciated by one of skill, methods of designing and constructing nucleic acid constructs and proteins or polypeptides (such as the systems, constructs and polypeptides described herein) are routine in the art. Generally, recombinant methods may be used. See, in general, Smales & James (Eds.), Therapeutic Proteins: Methods and Protocols (Methods in Molecular Biology), Humana Press (2005); and Crommelin, Sindelar & Meibohm (Eds.), Pharmaceutical Biotechnology: Fundamentals and Applications, Springer (2013). Methods of designing, preparing, evaluating, purifying and manipulating nucleic acid compositions are described in Green and Sambrook (Eds.), Molecular Cloning: A Laboratory Manual (Fourth Edition), Cold Spring Harbor Laboratory Press (2012).

[0531] The disclosure provides, in part, a nucleic acid, e.g., vector, encoding a Gene Writer polypeptide described herein, a template nucleic acid described herein, or both. In some embodiments, a vector comprises a selective marker, e.g., an antibiotic resistance marker. In some embodiments, the antibiotic resistance marker is a kanamycin resistance marker. In some embodiments, the antibiotic resistance marker does not confer resistance to beta-lactam antibiotics. In some embodiments, the vector does not comprise an ampicillin resistance marker. In some embodiments, the vector comprises a kanamycin resistance marker and does not comprise an ampicillin resistance marker. In some embodiments, a vector encoding a Gene Writer polypeptide is integrated into a target cell genome (e.g., upon administration to a target cell, tissue, organ, or subject). In some embodiments, a vector encoding a Gene Writer polypeptide is not integrated into a target cell genome (e.g., upon administration to a target cell, tissue, organ, or subject). In some embodiments, a vector encoding a template nucleic acid (e.g., template RNA) is not integrated into a target cell genome (e.g., upon administration to a target cell, tissue, organ, or subject). In some embodiments, if a vector is integrated into a target site in a target cell genome, the selective marker is not integrated into the genome. In some embodiments, if a vector is integrated into a target site in a target cell genome, genes or sequences involved in vector maintenance (e.g., plasmid maintenance genes) are not integrated into the genome. In some embodiments, if a vector is integrated into a target site in a target cell genome, transfer regulating sequences (e.g., inverted terminal repeats, e.g., from an AAV) are not integrated into the genome. In some embodiments, administration of a vector (e.g., encoding a Gene Writer polypeptide described herein, a template nucleic acid described herein, or both) to a target cell, tissue, organ, or subject results in integration of a portion of the vector into one or more target sites in the genome(s) of said target cell, tissue, organ, or subject. In some embodiments, less than 99, 95, 90, 80, 70, 60, 50, 40, 30, 20, 10, 5, 4, 3, 2, or 1% of target sites (e.g., no target sites) comprising integrated material comprise a selective marker (e.g., an antibiotic resistance gene), a transfer regulating sequence (e.g., an inverted terminal repeat, e.g., from an AAV), or both from the vector.

[0532] Exemplary methods for producing a therapeutic pharmaceutical protein or polypeptide described herein involve expression in mammalian cells, although recombinant proteins can also be produced using insect cells, yeast, bacteria, or other cells under control of appropriate promoters. Mammalian expression vectors may comprise non-transcribed elements such as an origin of replication, a suitable promoter, and other 5′ or 3′ flanking non-transcribed sequences, and 5′ or 3′ non-translated sequences such as necessary ribosome binding sites, a polyadenylation site, splice donor and acceptor sites, and termination sequences. DNA sequences derived from the SV40 viral genome, for example, SV40 origin, early promoter, splice, and polyadenylation sites may be used to provide other genetic elements required for expression of a heterologous DNA sequence. Appropriate cloning and expression vectors for use with bacterial, fungal, yeast, and mammalian cellular hosts are described in Green & Sambrook, Molecular Cloning: A Laboratory Manual (Fourth Edition), Cold Spring Harbor Laboratory Press (2012).

[0533] Various mammalian cell culture systems can be employed to express and manufacture recombinant protein. Examples of mammalian expression systems include CHO, COS, HEK293, HeLA, and BHK cell lines. Processes of host cell culture for production of protein therapeutics are described in Zhou and Kantardjieff (Eds.), Mammalian Cell Cultures for Biologics Manufacturing (Advances in Biochemical Engineering Biotechnology), Springer (2014). Compositions described herein may include a vector, such as a viral vector, e.g., a lentiviral vector, encoding a recombinant protein. In some embodiments, a vector, e.g., a viral vector, may comprise a nucleic acid encoding a recombinant protein.

[0534] Purification of protein therapeutics is described in Franks, Protein Biotechnology: Isolation, Characterization, and Stabilization, Humana Press (2013); and in Cutler, Protein Purification Protocols (Methods in Molecular Biology), Humana Press (2010).

[0535] In some embodiments, quality standards include, but are not limited to:

[0536] (i) the length of mRNA encoding the GeneWriter polypeptide, e.g., whether the mRNA has a length that is above a reference length or within a reference length range, e.g., whether at least 80, 85, 90, 95, 96, 97, 98, or 99% of the mRNA present is greater than 3000, 4000, or 5000 nucleotides long;

[0537] (ii) the presence, absence, and/or length of a polyA tail on the mRNA, e.g., whether at least 80, 85, 90, 95, 96, 97, 98, or 99% of the mRNA present contains a polyA tail (e.g., a polyA tail that is at least 5, 10, 20, 30, 50, 70, 100 nucleotides in length (SEQ ID NO: 2042));

[0538] (iii) the presence, absence, and/or type of a 5′ cap on the mRNA, e.g., whether at least 80, 85, 90, 95, 96, 97, 98, or 99% of the mRNA present contains a 5′ cap, e.g., whether that cap is a 7-methylguanosine cap, e.g., a O-Me-m7G cap;

[0539] (iv) the presence, absence, and/or type of one or more modified nucleotides (e.g., selected from pseudouridine, dihydrouridine, inosine, 7-methylguanosine, 1-N-methylpseudouridine (1-Me-Ψ), 5-methoxyuridine (5-MO-U), 5-methylcytidine (5mC), or a locked nucleotide) in the mRNA, e.g., whether at least 80, 85, 90, 95, 96, 97, 98, or 99% of the mRNA present contains one or more modified nucleotides;

[0540] (v) the stability of the mRNA (e.g., over time and/or under a pre-selected condition), e.g., whether at least 80, 85, 90, 95, 96, 97, 98, or 99% of the mRNA remains intact (e.g., greater than 100, 125, 150, 175, or 200 nucleotides long) after a stability test; or

[0541] (vi) the potency of the mRNA in a system for modifying DNA, e.g., whether at least 1% of target sites are modified after a system comprising the mRNA is assayed for potency.

### Kits, Articles of Manufacture, and Pharmaceutical Compositions

[0542] In an aspect the disclosure provides a kit comprising a Gene Writer or a Gene Writing system, e.g., as described herein. In some embodiments, the kit comprises a Gene Writer polypeptide (or a nucleic acid encoding the polypeptide) and a template RNA (or DNA encoding the template RNA). In some embodiments, the kit further comprises a reagent for introducing the system into a cell, e.g., transfection reagent, LNP, and the like. In some embodiments, the kit is suitable for any of the methods described herein. In some embodiments, the kit comprises one or more elements, compositions (e.g., pharmaceutical compositions), Gene Writers, and/or Gene Writer systems, or a functional fragment or component thereof, e.g., disposed in an article of manufacture. In some embodiments, the kit comprises instructions for use thereof.

[0543] In an aspect, the disclosure provides an article of manufacture, e.g., in which a kit as described herein, or a component thereof, is disposed.

[0544] In an aspect, the disclosure provides a pharmaceutical composition comprising a Gene Writer or a Gene Writing system, e.g., as described herein. In some embodiments, the pharmaceutical composition further comprises a pharmaceutically acceptable carrier or excipient. In some embodiments, the pharmaceutical composition comprises a template RNA and/or an RNA encoding the polypeptide. In embodiments, the pharmaceutical composition has one or more (e.g., 1, 2, 3, or 4) of the following characteristics:

[0545] (a) less than 1% (e.g., less than 0.5%, 0.4%, 0.3%, 0.2%, or 0.1%) DNA template relative to the template RNA and/or the RNA encoding the polypeptide, e.g., on a molar basis;

[0546] (b) less than 1% (e.g., less than 0.5%, 0.4%, 0.3%, 0.2%, or 0.1%) uncapped RNA relative to the template RNA and/or the RNA encoding the polypeptide, e.g., on a molar basis;

[0547] (c) less than 1% (e.g., less than 0.5%, 0.4%, 0.3%, 0.2%, or 0.1%) partial length RNAs relative to the template RNA and/or the RNA encoding the polypeptide, e.g., on a molar basis;

[0548] (d) substantially lacks unreacted cap dinucleotides.

### Chemistry, Manufacturing, and Controls (CMC)

[0549] Purification of protein therapeutics is described, for example, in Franks, Protein Biotechnology: Isolation, Characterization, and Stabilization, Humana Press (2013); and in Cutler, Protein Purification Protocols (Methods in Molecular Biology), Humana Press (2010).

[0550] In some embodiments, a Gene Writer™ system, polypeptide, and/or template nucleic acid (e.g., template RNA) conforms to certain quality standards. In some embodiments, a Gene Writer™ system, polypeptide, and/or template nucleic acid (e.g., template RNA) produced by a method described herein conforms to certain quality standards. Accordingly, the disclosure is directed, in some aspects, to methods of manufacturing a Gene Writer™ system, polypeptide, and/or template nucleic acid (e.g., template RNA) that conforms to certain quality standards, e.g., in which said quality standards are assayed. The disclosure is also directed, in some aspects, to methods of assaying said quality standards in a Gene Writer™ system, polypeptide, and/or template nucleic acid (e.g., template RNA). In some embodiments, quality standards include, but are not limited to, one or more (e.g., 1, 2, 3, 4, 5, 6, 7, 8, 9, 10, 11, or 12) of the following:

[0551] (i) the length of the template RNA, e.g., whether the template RNA has a length that is above a reference length or within a reference length range, e.g., whether at least 80, 85, 90, 95, 96, 97, 98, or 99% of the template RNA present is greater than 100, 125, 150, 175, or 200 nucleotides long;

[0552] (ii) the presence, absence, and/or length of a polyA tail on the template RNA, e.g., whether at least 80, 85, 90, 95, 96, 97, 98, or 99% of the template RNA present contains a polyA tail (e.g., a polyA tail that is at least 5, 10, 20, 30, 50, 70, 100 nucleotides in length (SEQ ID NO: 2042));

[0553] (iii) the presence, absence, and/or type of a 5′ cap on the template RNA, e.g., whether at least 80, 85, 90, 95, 96, 97, 98, or 99% of the template RNA present contains a 5′ cap, e.g., whether that cap is a 7-methylguanosine cap, e.g., a O-Me-m7G cap;

[0554] (iv) the presence, absence, and/or type of one or more modified nucleotides (e.g., selected from pseudouridine, dihydrouridine, inosine, 7-methylguanosine, 1-N-methylpseudouridine (1-Me-Ψ), 5-methoxyuridine (5-MO-U), 5-methylcytidine (5mC), or a locked nucleotide) in the template RNA, e.g., whether at least 80, 85, 90, 95, 96, 97, 98, or 99% of the template RNA present contains one or more modified nucleotides;

[0555] (v) the stability of the template RNA (e.g., over time and/or under a pre-selected condition), e.g., whether at least 80, 85, 90, 95, 96, 97, 98, or 99% of the template RNA remains intact (e.g., greater than 100, 125, 150, 175, or 200 nucleotides long) after a stability test;

[0556] (vi) the potency of the template RNA in a system for modifying DNA, e.g., whether at least 1% of target sites are modified after a system comprising the template RNA is assayed for potency;

[0557] (vii) the length of the polypeptide, first polypeptide, or second polypeptide, e.g., whether the polypeptide, first polypeptide, or second polypeptide has a length that is above a reference length or within a reference length range, e.g., whether at least 80, 85, 90, 95, 96, 97, 98, or 99% of the polypeptide, first polypeptide, or second polypeptide present is greater than 600, 650, 700, 750, 800, 850, 900, 950, 1000, 1050, 1100, 1150, 1200, 1250, 1300, 1350, 1400, 1450, 1500, 1600, 1700, 1800, 1900, or 2000 amino acids long (and optionally, no larger than 2500, 2000, 1500, 1400, 1300, 1200, 1100, 1000, 900, 800, 700, or 600 amino acids long);

[0558] (viii) the presence, absence, and/or type of post-translational modification on the polypeptide, first polypeptide, or second polypeptide, e.g., whether at least 80, 85, 90, 95, 96, 97, 98, or 99% of the polypeptide, first polypeptide, or second polypeptide contains phosphorylation, methylation, acetylation, myristoylation, palmitoylation, isoprenylation, glipyatyon, or lipoylation, or any combination thereof,

[0559] (ix) the presence, absence, and/or type of one or more artificial, synthetic, or non-canonical amino acids (e.g., selected from ornithine, β-alanine, GABA, δ-Aminolevulinic acid, PABA, a D-amino acid (e.g., D-alanine or D-glutamate), aminoisobutyric acid, dehydroalanine, cystathionine, lanthionine, Djenkolic acid, Diaminopimelic acid, Homoalanine, Norvaline, Norleucine, Homonorleucine, homoserine, O-methyl-homoserine and O-ethyl-homoserine, ethionine, selenocysteine, selenohomocysteine, selenomethionine, selenoethionine, tellurocysteine, or telluromethionine) in the polypeptide, first polypeptide, or second polypeptide, e.g., whether at least 80, 85, 90, 95, 96, 97, 98, or 99% of the polypeptide, first polypeptide, or second polypeptide present contains one or more artificial, synthetic, or non-canonical amino acids;

[0560] (x) the stability of the polypeptide, first polypeptide, or second polypeptide (e.g., over time and/or under a pre-selected condition), e.g., whether at least 80, 85, 90, 95, 96, 97, 98, or 99% of the polypeptide, first polypeptide, or second polypeptide remains intact (e.g., greater than 600, 650, 700, 750, 800, 850, 900, 950, 1000, 1050, 1100, 1150, 1200, 1250, 1300, 1350, 1400, 1450, 1500, 1600, 1700, 1800, 1900, or 2000 amino acids long (and optionally, no larger than 2500, 2000, 1500, 1400, 1300, 1200, 1100, 1000, 900, 800, 700, or 600 amino acids long)) after a stability test;

[0561] (xi) the potency of the polypeptide, first polypeptide, or second polypeptide in a system for modifying DNA, e.g., whether at least 1% of target sites are modified after a system comprising the polypeptide, first polypeptide, or second polypeptide is assayed for potency; or

[0562] (xii) the presence, absence, and/or level of one or more of a pyrogen, virus, fungus, bacterial pathogen, or host cell protein, e.g., whether the system is free or substantially free of pyrogen, virus, fungus, bacterial pathogen, or host cell protein contamination.

[0563] In some embodiments, a system or pharmaceutical composition described herein is endotoxin free.

[0564] In some embodiments, the presence, absence, and/or level of one or more of a pyrogen, virus, fungus, bacterial pathogen, and/or host cell protein is determined. In embodiments, whether the system is free or substantially free of pyrogen, virus, fungus, bacterial pathogen, and/or host cell protein contamination is determined.

[0565] In some embodiments, a pharmaceutical composition or system as described herein has one or more (e.g., 1, 2, 3, or 4) of the following characteristics:

[0566] (a) less than 1% (e.g., less than 0.5%, 0.4%, 0.3%, 0.2%, or 0.1%) DNA template relative to the template RNA and/or the RNA encoding the polypeptide, e.g., on a molar basis;

[0567] (b) less than 1% (e.g., less than 0.5%, 0.4%, 0.3%, 0.2%, or 0.1%) uncapped RNA relative to the template RNA and/or the RNA encoding the polypeptide, e.g., on a molar basis;

[0568] (c) less than 1% (e.g., less than 0.5%, 0.4%, 0.3%, 0.2%, or 0.1%) partial length RNAs relative to the template RNA and/or the RNA encoding the polypeptide, e.g., on a molar basis;

[0569] (d) substantially lacks unreacted cap dinucleotides.

### Applications

[0570] Using the systems described herein, optionally using any of delivery modalities described herein (including viral delivery modalities, such as AAVs), the invention also provides applications (methods) for modifying a DNA molecule, such as nuclear DNA, i.e., in the genome of a cell, whether in vitro, ex vivo, in situ, or in vivo, e.g, in a tissue in an organism, such as a subject including mammalian subjects, such as a human. By integrating coding genes into a RNA sequence template, the Gene Writer system can address therapeutic needs, for example, by providing expression of a therapeutic transgene in individuals with loss-of-function mutations, by replacing gain-of-function mutations with normal transgenes, by providing regulatory sequences to eliminate gain-of-function mutation expression, and/or by controlling the expression of operably linked genes, transgenes and systems thereof. In certain embodiments, the RNA sequence template encodes a promotor region specific to the therapeutic needs of the host cell, for example a tissue specific promotor or enhancer. In certain embodiments, the template nucleic acid encodes a promotor region specific to the therapeutic needs of the host cell, for example a tissue specific promotor or enhancer. In still other embodiments, a promotor can be operably linked to a coding sequence, e.g., for therapeutic intervention.

[0571] In certain aspects, the invention this provides methods of modifying a target DNA strand in a cell, tissue or subject, comprising administering a system as described herein (optionally by a modality described herein) to the cell, tissue or subject, where the system inserts the heterologous object sequence into the target DNA strand, thereby modifying the target DNA strand. In certain embodiments, the heterologous object sequence is thus expressed in the cell, tissue, or subject. In some embodiments, the cell, tissue or subject is a mammalian (e.g., human) cell, tissue or subject. Exemplary cells thus modified include a hepatocyte, lung epithelium, an ionocyte. Such a cell may be a primary cell or otherwise not immortalized. In related aspects, the invention also provides methods of treating a mammalian tissue comprising administering the a system as described herein to the mammal, thereby treating the tissue, wherein the tissue is deficient in the heterologous object sequence. In certain embodiments of any of the foregoing aspects and embodiments, the Gene Writer polypeptide is provided as a nucleic acid, which is present transiently.

[0572] In some embodiments, a system of the invention is capable of producing an insertion, substitution, deletion, or a combination thereof in target DNA. In some embodiments, an insertion, deletion, substitution, or combination thereof, increases or decreases expression (e.g. transcription or translation) of a gene. In some embodiments, an insertion, deletion, substitution, or combination thereof, increases or decreases expression (e.g. transcription or translation) of a gene by altering, adding, or deleting sequences in a promoter or enhancer, e.g. sequences that bind transcription factors. In some embodiments, an insertion, deletion, substitution, or combination thereof alters translation of a gene (e.g. alters an amino acid sequence), inserts or deletes a start or stop codon, alters or fixes the translation frame of a gene. In some embodiments, an insertion, deletion, substitution, or combination thereof alters splicing of a gene, e.g. by inserting, deleting, or altering a splice acceptor or donor site. In some embodiments, an insertion, deletion, substitution, or combination thereof alters transcript or protein half-life. In some embodiments, an insertion, deletion, substitution, or combination thereof alters protein localization in the cell (e.g. from the cytoplasm to a mitochondria, from the cytoplasm into the extracellular space (e.g. adds a secretion tag)). In some embodiments, an insertion, deletion, substitution, or combination thereof alters (e.g. improves) protein folding (e.g. to prevent accumulation of misfolded proteins). In some embodiments, an insertion, deletion, substitution, or combination thereof, alters, increases, decreases the activity of a gene, e.g. a protein encoded by the gene.

[0573] In embodiments, the Gene Writer™ gene editor system can provide therapeutic transgenes expressing, e.g., replacement blood factors or replacement enzymes, e.g., lysosomal enzymes. For example, the compositions, systems and methods described herein are useful to express, in a target human genome, agalsidase alpha or beta for treatment of Fabry Disease; imiglucerase, taliglucerase alfa, velaglucerase alfa, or alglucerase for Gaucher Disease; sebelipase alpha for lysosomal acid lipase deficiency (Wolman disease/CESD); laronidase, idursulfase, elosulfase alpha, or galsulfase for mucopolysaccharidoses; alglucosidase alpha for Pompe disease. For example, the compositions, systems and methods described herein are useful to express, in a target human genome factor I, II, V, VII, X, XI, XII or XIII for blood factor deficiencies.

[0574] In some embodiments, the heterologous object sequence encodes an intracellular protein (e.g., a cytoplasmic protein, a nuclear protein, an organellar protein such as a mitochondrial protein or lysosomal protein, or a membrane protein). In some embodiments, the heterologous object sequence encodes a membrane protein, e.g., a membrane protein other than a CAR, and/or an endogenous human membrane protein. In some embodiments, the heterologous object sequence encodes an extracellular protein. In some embodiments, the heterologous object sequence encodes an enzyme, a structural protein, a signaling protein, a regulatory protein, a transport protein, a sensory protein, a motor protein, a defense protein, or a storage protein. Other proteins include an immune receptor protein, e.g. a synthetic immune receptor protein such as a chimeric antigen receptor protein (CAR), a T cell receptor, a B cell receptor, or an antibody.

[0575] A Gene Writing™ system may be used to modify immune cells. In some embodiments, a Gene Writing™ system may be used to modify T cells. In some embodiments, T-cells may include any subpopulation of T-cells, e.g., CD4+, CD8+, gamma-delta, naïve T cells, stem cell memory T cells, central memory T cells, or a mixture of subpopulations. In some embodiments, a Gene Writing™ system may be used to deliver or modify a T-cell receptor (TCR) in a T cell. In some embodiments, a Gene Writing™ system may be used to deliver at least one chimeric antigen receptor (CAR) to T-cells. In some embodiments, a Gene Writing™ system may be used to deliver at least one CAR to natural killer (NK) cells. In some embodiments, a Gene Writing™ system may be used to deliver at least one CAR to natural killer T (NKT) cells. In some embodiments, a Gene Writing™ system may be used to deliver at least one CAR to a progenitor cell, e.g., a progenitor cell of T, NK, or NKT cells. In some embodiments, cells modified with at least one CAR (e.g., CAR-T cells, CAR-NK cells, CAR-NKT cells), or a combination of cells modified with at least one CAR (e.g., a mixture of CAR-NK/T cells) are used to treat a condition as identified in the targetable landscape of CAR therapies in MacKay, et al. Nat Biotechnol 38, 233-244 (2020), incorporated by reference herein in its entirety. In some embodiments, the immune cells comprise a CAR specific to a tumor or a pathogen antigen selected from a group consisting of AChR (fetal acetylcholine receptor), ADGRE2, AFP (alpha fetoprotein), BAFF-R, BCMA, CAIX (carbonic anhydrase IX), CCR1, CCR4, CEA (carcinoembryonic antigen), CD3, CD5, CD8, CD7, CD10, CD13, CD14, CD15, CD19, CD20, CD22, CD30, CD33, CLLI, CD34, CD38, CD41, CD44, CD49f, CD56, CD61, CD64, CD68, CD70, CD74, CD99, CD117, CD123, CD133, CD138, CD44v6, CD267, CD269, CDS, CLEC12A, CS1, EGP-2 (epithelial glycoprotein-2), EGP-40 (epithelial glycoprotein-40), EGFR(HER1), EGFR-VIII, EpCAM (epithelial cell adhesion molecule), EphA2, ERBB2 (HER2, human epidermal growth factor receptor 2), ERBB3, ERBB4, FBP (folate-binding protein), Flt3 receptor, folate receptor-α, GD2 (ganglioside G2), GD3 (ganglioside G3), GPC3 (glypican-3), GPI00, hTERT (human telomerase reverse transcriptase), ICAM-1, integrin B7, interleukin 6 receptor, IL13Ra2 (interleukin-13 receptor 30 subunit alpha-2), kappa-light chain, KDR (kinase insert domain receptor), LeY (Lewis Y), L1CAM (LI cell adhesion molecule), LILRB2 (leukocyte immunoglobulin like receptor B2), MARTI, MAGE-A1 (melanoma associated antigen A1), MAGE-A3, MSLN (mesothelin), MUC16 (mucin 16), MUCI (mucin I), KG2D ligands, NY-ESO-1 (cancer-testis antigen), PRI (proteinase 3), TRBCI, TRBC2, TFM-3, TACI, tyrosinase, survivin, hTERT, oncofetal antigen (h5T4), p53, PSCA (prostate stem cell antigen), PSMA (prostate-specific membrane antigen), hRORl, TAG-72 (tumor-associated glycoprotein 72), VEGF-R2 (vascular endothelial growth factor R2), WT-1 (Wilms tumor protein), and antigens of HIV (human immunodeficiency virus), hepatitis B, hepatitis C, CMV (cytomegalovirus), EBV (Epstein-Barr virus), HPV (human papilloma virus).

[0576] In some embodiments, immune cells, e.g., T-cells, NK cells, NKT cells, or progenitor cells are modified ex vivo and then delivered to a patient. In some embodiments, a Gene Writer™ system is delivered by one of the methods mentioned herein, and immune cells, e.g., T-cells, NK cells, NKT cells, or progenitor cells are modified in vivo in the patient.

[0577] In some embodiments, a Gene Writer™ system described herein is delivered to a tissue or cell from the cerebrum, cerebellum, adrenal gland, ovary, pancreas, parathyroid gland, hypophysis, testis, thyroid gland, breast, spleen, tonsil, thymus, lymph node, bone marrow, lung, cardiac muscle, esophagus, stomach, small intestine, colon, liver, salivary gland, kidney, prostate, blood, or other cell or tissue type. In some embodiments, a Gene Writer™ system described herein is used to treat a disease, such as a cancer, inflammatory disease, infectious disease, genetic defect, or other disease. A cancer can be cancer of the cerebrum, cerebellum, adrenal gland, ovary, pancreas, parathyroid gland, hypophysis, testis, thyroid gland, breast, spleen, tonsil, thymus, lymph node, bone marrow, lung, cardiac muscle, esophagus, stomach, small intestine, colon, liver, salivary gland, kidney, prostate, blood, or other cell or tissue type, and can include multiple cancers.

[0578] In some embodiments, a Gene Writer™ system described herein described herein is administered by enteral administration (e.g. oral, rectal, gastrointestinal, sublingual, sublabial, or buccal administration). In some embodiments, a Gene Writer™ system described herein is administered by parenteral administration (e.g., intravenous, intramuscular, subcutaneous, intradermal, epidural, intracerebral, intracerebroventricular, epicutaneous, nasal, intra-arterial, intra-articular, intracavernous, intraocular, intraosseous infusion, intraperitoneal, intrathecal, intrauterine, intravaginal, intravesical, perivascular, or transmucosal administration). In some embodiments, a Gene Writer™ system described herein is administered by topical administration (e.g., transdermal administration).

[0579] In some embodiments, a Gene Writing system can be used to make multiple modifications to a target cell, either simultaneously or sequentially. In some embodiments, a Gene Writing system can be used to further modify an already modified cell. In some embodiments, a Gene Writing system can be use to modify a cell edited by a complementary technology, e.g., a gene edited cell, e.g., a cell with one or more CRISPR knockouts. In some embodiments, the previously edited cell is a T-cell. In some embodiments, the previous modifications comprise gene knockouts in a T-cell, e.g., endogenous TCR (e.g., TRAC, TRBC), HLA Class I (B2M), PD1, CD52, CTLA-4, TIM-3, LAG-3, DGK. In some embodiments, a Gene Writing system is used to insert a TCR or CAR into a T-cell that has been previously modified.

[0580] In some embodiments, a Gene Writer™ system as described herein can be used to modify an animal cell, plant cell, or fungal cell. In some embodiments, a Gene Writer™ system as described herein can be used to modify a mammalian cell (e.g., a human cell). In some embodiments, a Gene Writer™ system as described herein can be used to modify a cell from a livestock animal (e.g., a cow, horse, sheep, goat, pig, llama, alpaca, camel, yak, chicken, duck, goose, or ostrich). In some embodiments, a Gene Writer™ system as described herein can be used as a laboratory tool or a research tool, or used in a laboratory method or research method, e.g., to modify an animal cell, e.g., a mammalian cell (e.g., a human cell), a plant cell, or a fungal cell.

[0581] In some embodiments, a Gene Writer™ system as described herein can be used to express a protein, template, or heterologous object sequence (e.g., in an animal cell, e.g., a mammalian cell (e.g., a human cell), a plant cell, or a fungal cell). In some embodiments, a Gene Writer™ system as described herein can be used to express a protein, template, or heterologous object sequence under the control of an inducible promoter (e.g., a small molecule inducible promoter). In some embodiments, a Gene Writing system or payload thereof is designed for tunable control, e.g., by the use of an inducible promoter. For example, a promoter, e.g., Tet, driving a gene of interest may be silent at integration, but may, in some instances, activated upon exposure to a small molecule inducer, e.g., doxycycline. In some embodiments, the tunable expression allows post-treatment control of a gene (e.g., a therapeutic gene), e.g., permitting a small molecule-dependent dosing effect. In embodiments, the small molecule-dependent dosing effect comprises altering levels of the gene product temporally and/or spatially, e.g., by local administration. In some embodiments, a promoter used in a system described herein may be inducible, e.g., responsive to an endogenous molecule of the host and/or an exogenous small molecule administered thereto.

[0582] In some embodiments, a Gene Writing system is used to make changes to non-coding and/or regulatory control regions, e.g., to tune the expression of endogenous genes. In some embodiments, a Gene Writing system is used to induce upregulation or downregulation of gene expression. In some embodiments, a regulatory control region comprises one or more of a promoter, enhancer, UTR, CTCF site, and/or a gene expression control region.

[0583] In some embodiments, a Gene Writing system may be used to treat or prevent a repeat expansion disease (e.g., a disease of Table 26), or to reduce the severity or a symptom thereof. In some embodiments, the repeat expansion disease comprises expansion of a trinucleotide repeat. In some embodiments, the subject has at least 10, 20, 30, 40, or 50 copies of the repeat. In embodiments, the repeat expansion disease is an inherited disease. Non-limiting examples of repeat expansion diseases include Huntington's disease (HD) and myotonic dystrophy. For example, healthy individuals may possess between 10 and 35 tandem copies of the CAG trinucleotide repeat, while Huntington's patients frequently possess >40 copies, which can result, e.g., in an elongated and dysfunctional Huntingtin protein. In some embodiments, a Gene Writer corrects a repeat expansion, e.g., by recognizing DNA at the terminus of the repeat region and nicking one strand (FIG. 30). In some embodiments, the template RNA component of the Gene Writer comprises a region with a number of repeats characteristic of a healthy subject, e.g., about 20 repeats (e.g., between 5-10, 10-15, 15-20, 20-25, 25-30, 30-35, or 35-40 repeats). In some embodiments, the template RNA component of the Gene Writer is copied by TPRT into the target site. In some embodiments, a second strand nick and second strand synthesis then results in the integration of the newly copied DNA comprising a correct number of repeats (e.g., as described herein). In some embodiments, the system recognizes DNA at the terminus of the repeat region and the template carries the information for the new number of repeats. In embodiments, a Gene Writer can be used in this way regardless of the number of repeats present in an individual and/or in an individual cell. Owing to the presence of multiple repeats, an alternative non-GeneWriter therapeutic (e.g., a CRISPR-based homologous recombination therapeutic) might, in some embodiments, result in unpredictable repair behavior. Further non-limiting examples of repeat expansion diseases and the causative repeats can be found, for example, in La Spada and Taylor Nat Rev Genet 11(4):247-258 (2010), which is incorporated herein by reference in its entirety.

[0584] In some embodiments, a Gene Writing system may be used to treat a healthy individual, e.g., as a preventative therapy. Gene Writing systems can, in some embodiments, be targeted to generate mutations, e.g., that have been shown to be protective towards a disease of interest. An exemplary list of such diseases and protective mutation targets can be found in Table 22.

[0585] A Gene Writing™ system may be used to treat indications of the liver. In some embodiments, the liver diseases preferred for therapeutic application of Gene Writing™ include, but are not limited to, diseases selected from any of Tables 10A-10D or 11A-11G, or Table 5 of WO2020014209, which is hereby incorporated by reference. In exemplary embodiments, OTC deficiency is addressed by delivering all or a fragment of an OTC gene, e.g., all or a fragment of the OTC gene as contained in Table 5 of WO2020014209. In some embodiments, OTC deficiency is addressed by delivering a complete OTC gene expression cassette to a genome that complements the function of the mutated gene. In some embodiments, a fragment of the OTC gene is used that replaces the pathogenic mutation at its endogenous locus. In other embodiments, a Gene Writing™ system is used to address a condition selected from Column 6 of Table 4 of WO2020014209, paragraph “Lung diseases” below, or any of Tables 10A-10D or 11A-11G by delivering all or a fragment of a gene expression cassette encoding the corresponding gene indicated in Column 1 of Table 4 of WO2020014209, paragraph “Lung diseases” below, or in any of Tables 10A-10D or 11A-11G. In some embodiments, all or a fragment of said gene expression cassette is delivered to the endogenous locus of the pathogenic mutation. In some embodiments, all or a fragment of said gene expression cassette is integrated at a separate locus in the genome and complements the function of the mutated gene.

[0586] In certain embodiments a Gene Writer™ system provides a heterologous object sequence comprising a gene in Table 4 of WO2020014209, or paragraph “Lung diseases” below.

TABLE 10A
Indications and genetic targets, e.g., in the liver

| Disease | Gene Affected |
|---|---|
| Acute intermittent porphyria | HMBS |
| Alpha-1-antitrypsin deficiency (AAT) | SERPINA1 |
| Arginase deficiency | ARG1 |
| Argininosuccinate lyase deficiency | ASL |
| Carbamoyl phosphate synthetase I deficiency | CPS1 |
| Citrin deficiency | SLC25A13 |
| Citrullinemia type I | ASS1 |
| Crigler-Najjar syndrome (Hyperbilirubinemia) | UGT1A1 |
| Fabry disease | GLA |
| Familial hypercholesterolemia 4 | LDLRAP1 |
| (homozygous familial cholesterolemia) | |
| Glutaric aciduria I | GCDH |
| Glutaric aciduria II | GA IIA: ETFA |
| (multiple acyl-CoA dehydrogenase deficiency) | GA IIB: ETFB |
| | GA IIC: ETFDH |
| Glycogen storage disease type IV | GBE1 |
| Hemophilia A | F8 |
| Hemophilia B | F9 |
| Hereditary hemochromatosis | HFE |
| Homocystinuria | CBS |
| Maple syrup urine disease (MSUD) | Type Ia: BCKDHA |
| | Type Ib: BCKDHB |
| | Type II: DBT |
| Methylmalonic acidemia | MMUT |
| (methylmalonyl-CoA mutase deficiency) | |
| MPS 1S (Scheie syndrome) | IDUA |
| MPS2 | IDS |
| MPS3 (San Filippo Syndrome) | Type IIIa: SGSH |
| | Type IIIb: NAGLU |
| | Type IIIc: HGSNAT |
| | Type IIId: GNS |
| MPS4 | Type IVA: GALNS |
| | Type IVB: GLB1 |
| MPS6 | ARSB |
| MPS7 | GUSB |
| Ornithine transcarbamylase deficiency | OTC |
| Phenylketonuria | PAH |
| (phenylalanine hydroxylase deficiency) | |
| Polycystic Liver Disease | PCLD1: PRKCSH |
| | PCLD2: SEC63 |
| | PLCD3: ALG8 |
| | PCLD4: LRP5 |
| Pompe disease | GAA |
| Primary Hyperoxaluria 1 (oxalosis) | AGXT |
| Progressive familial intrahepatic cholestasis | ATP8B1 |
| type 1 | |
| Progressive familial intrahepatic cholestasis | ABCB11 |
| type 2 | |
| Progressive familial intrahepatic cholestasis | ABCB4 |
| type 3 | |
| Propionic acidemia | PCCB; PCCA |
| Pyruvate carboxylase deficiency | PC |
| Tyrosinemia type I | FAH |
| Wilson's disease | ATP7B |

TABLE 10B
Indications and genetic targets for HSCs

| Disease | Gene Affected |
|---|---|
| Adrenoleukodystrophy (CALD) | ABCD1 |
| Alpha-mannosidosis | MAN2B1 |
| Blackfan-Diamond Anemia | |
| Congenital amegakaryocytic thrombocytopenia | MPL |
| Dyskeratosis Congenita | TERC |
| Fanconi anemia | FANC |
| Gaucher disease | GBA |
| Globoid cell leukodystrophy (Krabbe disease) | GALC |
| Hemophagocytic lymphohistiocytosis | PRF1; STX11; |
| | STXBP2; |
| | UNC13D |
| Malignant infantile osteopetrosis- | Many genes |
| autosomal recessive osteopetrosis | implicated |
| Metachromatic leukodystrophy | PSAP |
| MPS 1S (Scheie syndrome) | IDUA |
| MPS2 | IDS |
| MPS7 | GUSB |
| Mucolipidosis II | GNPTAB |
| Niemann-Pick disease A and B | SMPD1 |
| Niemann-Pick disease C | NPC1 |
| Pompe disease | GAA |
| Pyruvate kinase deficiency (PKD) | PKLR |
| Sickle cell disease (SCD) | HBB |
| Tay Sachs | HEXA |
| Thalassemia | HBB |

TABLE 10C
Indications and genetic targets for the CNS

| Disease | Gene Affected |
|---|---|
| Alpha-mannosidosis | MAN2B1 |
| Ataxia-telangiectasia | ATM |
| CADASIL | NOTCH3 |
| Canavan disease | ASPA |
| Carbamoyl-phosphate synthetase 1 deficiency | CPS1 |
| CLN1 disease | PPT1 |
| CLN2 Disease | TPP1 |
| CLN3 Disease | CLN3 |
| (Juvenile neuronal ceroid lipofuscinosis, | |
| Batten Disease) | |
| Coffin-Lowry syndrome | RPS6KA3 |
| Congenital myasthenic syndrome 5 | COLQ |
| Cornelia de Lange syndrome (NIPBL) | NIPBL |
| Cornelia de Lange syndrome (SMC1A) | SMC1A |
| Dravet syndrome (SCN1A) | SCN1A |
| Glycine encephalopathy (GLDC) | GLDC |
| GM1 gangliosidosis | GLB1 |
| Huntington's Disease | HTT |
| Hydrocephalus with stenosis of the | L1CAM |
| aqueduct of Sylvius | |
| Leigh Syndrome | SURF1 |
| Metachromatic leukodystrophy (ARSA) | ARSA |
| MPS type 2 | IDS |
| MPS type 3 | Type 3a: SGSH |
| | Type 3b: NAGLU |
| Mucolipidosis IV | MCOLN1 |
| Neurofibromatosis Type 1 | NF1 |
| Neurofibromatosis type 2 | NF2 |
| Pantothenate kinase-associated | PANK2 |
| neurodegeneration | |
| Pyridoxine-dependent epilepsy | ALDH7A1 |
| Rett syndrome (MECP2) | MECP2 |
| Sandhoff disease | HEXB |
| Semantic dementia (Frontotemporal dementia) | MAPT |
| Spinocerebellar ataxia with axonal neuropathy | SETX |
| (Ataxia with Oculomotor Apraxia) | |
| Tay-Sachs disease | HEXA |
| X-linked Adrenoleukodystrophy | ABCD1 |

TABLE 10D
Indications and genetic targets for the eye

| Disease | Gene Affected |
|---|---|
| Achromatopsia | CNGB3 |
| Amaurosis Congenita (LCA1) | GUCY2D |
| Amaurosis Congenita (LCA10) | CEP290 |
| Amaurosis Congenita (LCA2) | RPE65 |
| Amaurosis Congenita (LCA8) | CRB1 |
| Choroideremia | CHM |
| Cone Rod Dystrophy (ABCA4) | ABCA4 |
| Cone Rod Dystrophy (GUCY2D) | GUCY2D |
| Cystinosis, Ocular Nonnephropathic | CTNS |
| Doyne Honeycomb Retinal Dystrophy (DHRD) | EFEMP1 |
| Familial Oculoleptomeningeal Amyloidosis | TTR |
| Keratitis-ichthyosis-deafness (KID) | GJB2 |
| Lattice corneal dystrophy type I | TGFBI |
| Macular Corneal Dystrophy (MCD) | CHST6 |
| Meesmann Corneal Dystrophy | KRT12; KRT3 |
| Optic Atrophy | OPA1 |
| Retinitis Pigmentosa (AR) | USH2A |
| Retinitis Rigmentosa (AD) | RHO |
| Sorsby Fundus Dystrophy | TIMP3 |
| Stargardt Disease | ABCA4 |

[0587] In some embodiments, a GeneWriter system described herein is used to treat an indication of any of Tables 11A-11G. For instance, in some embodiments the GeneWriter system modifies a target site in genomic DNA in a cell, wherein the cell comprises a mutation at a gene of any of Tables 11A-11G, e.g., in a subject having the corresponding indication listed in any of Tables 11A-11G. In some embodiments, the target site is in a random site in the genome. In some embodiments, the target site is in a GSH sequence. In some embodiments, the cell is a liver cell that comprises a mutation in a gene of Table 11A, e.g., in a subject having the corresponding indication listed in Table 11A. In some embodiments, the cell is an HSC that comprises a mutation in a gene of Table 11B, e.g., in a subject having the corresponding indication listed in Table 11B. In some embodiments, the cell is a CNS cell comprising a mutation in a gene of Table 11C, e.g., in a subject having the corresponding indication listed in Table 11C. In some embodiments, the cell is a cell of the eye that comprises a mutation in a gene of Table 11D, e.g., in a subject having the corresponding indication listed in Table 11D. In some embodiments, the cell is a cell of the lung that comprises a mutation in a gene of Table 11E, e.g., in a subject having the corresponding indication listed in Table 11E. In some embodiments, the cell is a muscle cell (e.g., skeletal muscle cell) that comprises a mutation in a gene of Table 11F, e.g., in a subject having the corresponding indication listed in Table 11F. In some embodiments, the cell is a skin cell that comprises a mutation in a gene of Table 11G, e.g., in a subject having the corresponding indication listed in Table 11G.

TABLE 11A
Indications and genetic targets for the liver

| Disease | Gene Affected |
|---|---|
| 3-hydroxy-3-methylglutaryl-CoA | HMGCL |
| lyase deficiency | |
| 3-methylcrotonyl-CoA carboxylase | MCCC1 |
| (3MCC) deficiency | |
| Acute hepatic porphyria | ALAD |
| Acute intermittent porphyria | HMBS |
| Alagille syndrome | JAG1 |
| Alpha-1-antitrypsin deficiency (AAT) | SERPINA1 |
| Alström syndrome | ALMS1 |
| Arginase deficiency | ARG1 |
| Argininosuccinate lyase deficiency | ASL |
| Carbamoyl phosphate synthetase I deficiency | CPS1 |
| Cholesteryl ester storage disease | LIPA |
| Citrin deficiency | SLC25A13 |
| Citrullinemia type I | ASS1 |
| Crigler-Najjar syndrome (Hyperbilirubinemia) | UGT1A1 |
| D-2-hydroxyglutaric aciduria type I | D2HGDH |
| Fabry disease | GLA |
| Familial chylomicronemia syndrome | LPL |
| Familial hypercholesterolemia 4 | LDLRAP1 |
| (homozygous familial cholesterolemia) | |
| Farber disease | ASAH1 |
| Gaucher disease | GBA |
| Glutaric aciduria I | GCDH |
| Glutaric aciduria II | GA IIA: ETFA |
| (multiple acyl-CoA dehydrogenase deficiency) | GA IIB: ETFB |
| | GA IIC: ETFDH |
| Glutaric aciduria III | C7orf10 |
| Glycogen storage disease type I | GSD1A: G6PC |
| | GSD1B: SLC37A4 |
| | GSD1C: SLC37A4 |
| Glycogen storage disease type IV | GBE1 |
| Hemophilia A | F8 |
| Hemophilia B | F9 |
| Hereditary amyloidosis (hTTR) | TTR |
| Hereditary fructose intolerance | ALDOB |
| Hereditary hemochromatosis | HFE |
| Homocystinuria | CBS |
| Hyperammonemia-hyperornithinemia- | SLC25A15 |
| homocitrullinuria (HHH) syndrome | |
| Hyperoxaluria 1 (oxalosis) | HP1: AGXT |
| | HP2: GRHPR |
| Isovaleric acidemia | IVD |
| Lipoprotein lipase deficiency | LPL |
| Maple syrup urine disease (MSUD) | Type Ia: BCKDHA |
| | Type Ib: BCKDHB |
| | Type II: DBT |
| Methylmalonic acidemia | MMUT |
| (methylmalonyl-CoA mutase deficiency) | |
| Mitochondrial neurogastrointestinal | TYMP |
| encephalopathy syndrome | |
| MPS 1S (Scheie syndrome) | IDUA |
| MPS2 | IDS |
| MPS3 (San Filippo Syndrome) | Type IIIa: SGSH |
| | Type IIIb: NAGLU |
| | Type IIIc: HGSNAT |
| | Type IIId: GNS |
| MPS4 | Type IVA: GALNS |
| | Type IVB: GLB1 |
| MPS6 | ARSB |
| MPS7 | GUSB |
| MPS9 | HYAL1 |
| N-acetylglutamate synthase deficiency | NAGS |
| Ornithine transcarbamylase deficiency | OTC |
| Phenylketonuria | PAH |
| (phenylalanine hydroxylase deficiency) | |
| Polycystic Liver Disease | PCLD1: PRKCSH |
| | PCLD2: SEC63 |
| | PLCD3: ALG8 |
| | PCLD4: LRP5 |
| Pompe disease | GAA |
| Primary Hyperoxaluria 1 (oxalosis) | AGXT |
| Progressive familial intrahepatic cholestasis | ATP8B1 |
| type 1 | |
| Progressive familial intrahepatic cholestasis | ABCB11 |
| type 2 | |
| Progressive familial intrahepatic cholestasis | ABCB4 |
| type 3 | |
| Progressive familial intrahepatic cholestasis | TJP2 |
| type 4 | |
| Propionic acidemia | PCCB; PCCA |
| Pyruvate carboxylase deficiency | PC |
| Tyrosinemia type I | FAH |
| Wilson's disease | ATP7B |

TABLE 11B
Indications and genetic targets for HSCs

| Disease | Gene Affected |
|---|---|
| ADA-SCID | ADA |
| JAK-3 SCID | JAK3 |
| Pyruvate kinase deficiency (PKD) | PKLR |
| RAG 1/2 Deficiency (SCID with granulomas) | RAG |
| Wiskott-Aldrich Syndrome | WAS |
| X-linked agammaglobulinemia | BTK |
| X-linked SCID | IL2RG |
| Adrenoleukodystrophy (CALD) | ABCD1 |
| Alpha-mannosidosis | MAN2B1 |
| Aspartylglycosaminuria | AGA |
| Blackfan-Diamond Anemia | |
| Chronic granulomatous disease | CYBB; CYBA; |
| | NCF1; NCF2; NCF4 |
| Congenital amegakaryocytic thrombocytopenia | MPL |
| Congenital dyserythropoietic anemia | CDAN1 |
| Fanconi anemia | FANC |
| Fucosidosis | FUCA1 |
| Gaucher disease | GBA |
| Glanzmann's thrombasthenia | ITGA2B; ITGB3 |
| Globoid cell leukodystrophy (Krabbe disease) | GALC |
| Gunther disease | UROS |
| (congenital erythropoietic porphyria) | |
| Hemophagocytic lymphohistiocytosis | PRF1; STX11; |
| | STXBP2; UNC13D |
| Hemophilia A | F8 |
| Hemophilia B | F9 |
| IPEX Syndrome | FOXP3 |
| Kostmann's syndrome | HAX1 |
| (severe congenital neutropenia) | |
| Leukocyte adhesion deficiency | ITGB2; FERMT3 |
| Malignant infantile osteopetrosis- | Many genes |
| autosomal recessive osteopetrosis | implicated |
| Metachromatic leukodystrophy | PSAP |
| Molybdenum cofactor deficiency | MOCS1 |
| MPS 1S (Scheie syndrome) | IDUA |
| MPS2 | IDS |
| MPS6 | ARSB |
| MPS7 | GUSB |
| Mucolipidosis II | GNPTAB |
| Niemann-Pick disease A and B | SMPD1 |
| Niemann-Pick disease C | NPC1 |
| Pompe disease | GAA |
| Purine nucleoside phosphorylase deficiency | PNP |
| Shwachman-Diamond syndrome | SBDS |
| Sickle cell disease (SCD) | HBB |
| Tay Sachs | HEXA |
| Thalassemia | HBB |
| Wolman syndrome | LIPA |
| X-linked hyper IgM syndrome | TNFSF5 |
| X-linked lymphoproliferative disease | SH2D1A |
| X-linked sideroblastic anemia | ALAS2 |
| 17-alpha-hydroxylase deficiency | CYP17A1 |
| Common variable immunodeficiency | Many genes |
| | implicated |
| IL-7R SCID | IL7R |
| Kostmann's syndrome | ELANE |
| (severe congenital neutropenia) | |

TABLE 11C
Indications and genetic targets for the CNS

| Disease | Gene Affected |
|---|---|
| Cornelia de Lange syndrome (SMC1A) | SMC1A |
| Neurofibromatosis Type 1 | NF1 |
| Neurofibromatosis type 2 | NF2 |
| Rett syndrome (MECP2) | MECP2 |

TABLE 11D
Indications and genetic targets for the eye

| Disease | Gene Affected |
|---|---|
| Cone Rod Dystrophy (CRX) | CRX |
| Cone Rod Dystrophy (GUCY2D) | GUCY2D |
| Lattice corneal dystrophy type I | TGFBI |
| Retinitis Rigmentosa (AD) | RHO |
| Vitelliform Macular Dystrophy | BEST1; PRPH2 |

TABLE 11E
Indications and genetic targets for the lung

| Disease | Gene Affected |
|---|---|
| Alpha-1 antitrypsin deficiency | SERPINA1 |
| Cystic fibrosis | CFTR |
| Fetal akinesia deformation sequence 1 | MUSK |
| Fetal akinesia deformation sequence 2 | RAPSN |
| Fetal akinesia deformation sequence 3 | DOK7 |
| Fetal akinesia deformation sequence 4 | NUP88 |
| Microphthalmia syndromic 9 | STRA6 |
| Primary ciliary dyskinesia | DNAI1; DNAH5 |
| | (~30%) |
| | many others |
| Pulmonary alveolar microlithiasis | SLC34A2 |
| Pulmonary venoocclusive disease 2 | EIF2AK4 |
| Surfactant Protein B (SP-B) Deficiency | SFTPB |
| (pulmonary surfactant metabolism dysfunction 1) | |
| Surfactant metabolism dysfunction, pulmonary, 5 | CSF2RB |
| Surfactant metabolism dysfunction, pulmonary, 4 | CSF2RA |
| Surfactant metabolism dysfunction, pulmonary, 3 | ABCA3 |

TABLE 11F
Indications and genetic targets for skeletal muscle

| Disease | Gene Affected |
|---|---|
| Becker muscular dystrophy | DMD |
| Fukuyama CMD | FKTN |
| Muscle-eye-brain diseases | POMGNT1 |
| Rigid spine syndrome | SELENON |
| Duchenne muscular dystrophy | DMD |
| Emery-Dreifuss muscular dystrophy, AR | LMNA |
| Limb-girdle muscular dystrophy 2A | CAPN3 |
| Limb-girdle muscular dystrophy 2B | DYSF |
| Limb-girdle muscular dystrophy type 2E | SGCB |
| Limb-girdle muscular dystrophy type 2F | SGCD |
| Limb-girdle muscular dystrophy type 2H | TRIM32 |
| Limb-girdle muscular dystrophy, type 2C | SGCG |
| Limb-girdle muscular dystrophy, type 2D | SGCA |
| Centronuclear myopathy 2 | BIN1 |
| Centronuclear myopathy, X-linked | MTM1 |
| Centronuclear myopathy 5 | SPEG |
| Centronuclear myopathy 6 | ZAK |
| Congenital myopathies with | SELENON; |
| fiber type disproportion | TPM3; ACTA1 |
| Central core disease | RYR1 |
| Multiminicore myopathy | RYR1 |
| Myosin storage myopathy, AR | MYH7 |
| Nemaline myopathies | NEB |
| | ACTA1 |
| GNE myopathy/Nonaka myopathy/ | GNE |
| hereditary inclusion-body myopathy | |
| Markesbery-Griggs late-onset distal myopathy | TTN |
| Miyoshi muscular dystrophy 1 | DYSF |
| Miyoshi muscular dystrophy 3 | ANO5 |
| Inclusion-body myositis 2 | GNE |
| Carnitine deficiency | SLC22A5 |
| Carnitine palmitoyltransferase deficiency 1A | CPT1A |
| Myoadenylate deaminase deficiency | AMPD1 |
| Phosphofructokinase deficiency | PFKM |
| (Tarui disease) (GSD VII) | |
| Phosphoglycerate kinase deficiency | PGK1 |
| Phosphoglycerate mutase deficiency | PGAM2 |
| (GSD X) | |
| Phosphorylase deficiency | PYGM |
| (McArdle disease) (GSD V) | |
| Myofibrillar myopathy 1 | DES |
| Myofibrillar myopathy 7 | KY |
| Myofibrillar myopathy 8 | PYROXD1 |
| Congenital myasthenic syndrome | CHRNE (>50% of |
| | cases); RAPSN, |
| | CHAT, COLQ, |
| | DOK7; others |
| Charcot-Marie-Tooth 2 | MFN2 |
| | (20% of cases) |
| Charcot-Marie-Tooth 4 | A: GDAP1 |
| | F: PRX |
| | K: SURF1 |
| Giant axonal neuropathy 1 | GAN |
| Becker myotonia | CLCN1 |
| Mitochondrial DNA depletion syndrome 2 | TK2 |

TABLE 11G
Indications and genetic targets for the skin

| Disease | Gene Affected |
|---|---|
| Acrodermatitis Enteropathica | SLC39A4 |
| Alkaptonuria | HGD |
| Ataxia Telangiectasia | ATM |
| Berardinelli-Seip Syndrome | BSCL2; AGPAT2; |
| | CAVIN1; CAV1 |
| Biotinidase Deficiency | BTD |
| Bloom Syndrome | RECQL3 |
| Cerebrotendinous Xanthomatosis | CYP27A1 |
| Chediak-Higashi Disease | LYST |
| Chondrodysplasia Punctata | ARSE |
| Chronic Granulomatous Disease | CYBB; CYBA; NCF1; |
| | NCF2; NCF4 |
| Cockayne Syndrome | ERCC8; ERCC6 |
| Congenital Erythropoietic Porphyria | UROS |
| Cutis Laxa | ATP6VOA2; FBLN5; |
| | ALDH18A1; |
| | PYCR1; LTBP4 |
| De Barsy Syndrome | ALHD18A1; PYCR1 |
| Dermatosparaxis | ADAMTS2 |
| (Ehlers-Danlos Type VII) | |
| Dyskeratosis Congenita | TERC; TERT; |
| | RTEL1; ACD; |
| | DKC1; NOLA3 |
| Ehlers-Danlos Type VI | PLOD1; FKBP14 |
| Epidermodysplasia Verruciformis | TMC6 |
| Epidermolysis Bullosa | COL7A1 |
| Dystrophica Pretibial | |
| Epidermolysis Bullosa | COL7A1; MMP1 |
| Dystrophica Recessive | |
| (Hallopeau-Siemens) | |
| Epidermolysis Bullosa Junctional | LAMA3; LAMC2; |
| | LAMB3; |
| | COL17A1; ITGB4 |
| Erythropoietic Protoporphyria | FECH |
| Fabry Disease | GLA |
| Familial Dysautonomia | IKBKAP |
| Familial Mucocutaneous Candidiasis | CARD9; TRAF3IP2; |
| | IL17F; |
| | CLEC7A; IL17RC |
| Fanconi Anemia | FANC |
| Focal Facial Ectodermal Dysplasia | EDA |
| GAPO Syndrome | ANTXR1 |
| Griscelli Syndrome Types 1, 2, and 3 | MYO5A; RAB27A; |
| | MLPH |
| Harlequin Ichthyosis | ABCA12 |
| Hartnup Disorder | SLC6A19 |
| Hemochromatosis | HFE; HJV; TFR2 |
| Hermansky-Pudlak Syndrome | HPS1; HPS6; |
| | AP3B1; HPS4; |
| | DTNBP1; HPS5; |
| | HPS3; AP3D1; |
| | BLOC1S3; |
| | BLOC1S6 |
| Hyaline Fibromatosis Syndrome | ANTXR2 |
| (systemic hyalinosis) | |
| Hypohidrotic Ectodermal | EDA; EDAR; |
| Dysplasia | EDARADD |
| Keratosis Follicularis | MBTPS2 |
| Spinulosa Decalvans | |
| Kindler Syndrome | FERMT1 |
| Lamellar Exfoliation of the Newborn | TGM1 |
| Lamellar Ichthyosis/Nonbullous | ALOX12B |
| Congenital Ichthyosiform | |
| Erythroderma (ARCI) | |
| Leprechaunism | INSR |
| Lipogranulomatosis | ASAH1 |
| Lipoid Proteinosis | ECM1 |
| Mal de Meleda | SLURP1 |
| Menkes Disease | ATP7A |
| Mutiple Pterygia Escobar Variant | CHRNG |
| Netherton Syndrome | SPINK5 |
| Neu-Laxova Syndrome | PHGDH; PSAT1 |
| Neutral Lipid Storage | ABHD5 |
| Disease with Ichthyosis | |
| Oculocutaneous Albinism | TYR |
| Tyrosinase Negative | |
| Oculocutaneous Albinism | OCA2; MC1R |
| Tyrosinase Positive | |
| Papillon-Lefèvre | CTSC |
| Peeling Skin Syndrome | CDSN; TGM5; |
| | CHST8; CSTA; |
| | SERPINB8; FLG2 |
| Pili Trianguli Et Canaliculi | PADI3 |
| (uncombable hair syndrome) | |
| Prolidase Deficiency | PEPD |
| Pseudoxanthoma Elasticum | ABCC6 |
| (PXE) | |
| Refsum Disease | PHYH |
| Restrictive Dermopathy | ZYMPSTE24; LMNA |
| Richner-Hanhart Syndrome | TAT |
| (tyrosinemia type II) | |
| Rothmund-Thomson Syndrome | RECQL4; ANAPC1 |
| Sjogren-Larsson Syndrome | ALDH3A2 |
| Transient Bullous Dermolysis | COL7A1 |
| of the Newborn | |
| Trichothiodystrophy | ERCC2; ERCC3; |
| | MPLKIP; |
| | GTF2H5; GTF2E2 |
| Tumoral Calcinosis | GALNT3; SAMD9; |
| | FRF23; |
| Vitiligo | Various |
| Werner Syndrome | RECQL2 |
| Wiskott-Aldrich Syndrome | WAS |
| Wooly Hair | KRT25; LPAR6 |
| Xeroderma Pigmentosum | ERCC2; ERCC3; |
| | ERCC4; ERCC5; |
| | XPA; XPC; |
| | DDB2; POLH |
| X-linked Recessive Ichthyosis | STS |
| Yellow Mutant Albinism | TYR |

Additional suitable indications

[0588] Exemplary suitable diseases and disorders that can be treated by the systems or methods provided herein, for example, those comprising Gene Writers, include, without limitation: Baraitser-Winter syndromes 1 and 2; Diabetes mellitus and insipidus with optic atrophy and deafness, Alpha-1-antitrypsin deficiency; Heparin cofactor II deficiency; Adrenoleukodystrophy; Keppen-Lubinsky syndrome; Treacher collins syndrome I: Mitochondrial complex I, II, III, III (nuclear type 2, 4, or 8) deficiency, Hypermanganesemia with dystonia, polycythemia and cirrhosis, Carcinoid tumor of intestine, Rhabdoid tumor predisposition syndrome 2; Wilson disease, Hyperphenylalaninemia, bh4-deficient, a, due to partial pts deficiency, BH4-deficient, D. and non-pku; Hyperinsulinemic hypoglycemia familial 3, 4, and 5; Keratosis follicularis; Oral-facial-digital syndrome; SeSAME syndrome; Deafness, nonsyndromic sensorineural, mitochondrial; Proteinuria; Insulin-dependent diabetes mellitus secretory diarrhea syndrome; Moyamoya disease 5; Diamond-Blackfan anemia 1, 5, 8, and 10; Pseudoachondroplastic spondyloepiphyseal dysplasia syndrome; Brittle cornea syndrome 2; Methylmalonic acidemia with homocystinuria; Adams-Oliver syndrome 5 and 6; autosomal recessive Agammaglobulinemia 2; Cortical malformations, occipital; Febrile seizures, familial, 11; Mucopolysaccharidosis type VI, type VI (severe), and type VII; Marden Walker like syndrome; Pseudoneonatal adrenoleukodystrophy; Spheroid body myopathy, Cleidocranial dysostosis; Multiple Cutaneous and Mucosal Venous Malformations; Liver failure acute infantile; Neonatal intrahepatic cholestasis caused by citrin deficiency; Ventricular septal defect I; Oculodentodigital dysplasia; Wilms tumor 1, Weill-Marchesani-like syndrome; Renal adysplasia; Cataract 1, 4, autosomal dominant, autosomal dominant, multiple types, with microcomea, coppock-like, juvenile, with microcomea and glucosuria, and nuclear diffuse nonprogressive; Odontohypophosphatasia; Cerebro-oculo-facio-skeletal syndrome; Schizophrenia 15, Cerebral amyloid angiopathy, APP-related, Hemophagocytic lymphohistiocytosis, familial, 3; Porphobilinogen synthase deficiency; Episodic ataxia type 2; Trichorhinophalangeal syndrome type 3, Progressive familial heart block type IB; Glioma susceptibility 1; Lichtenstein-Knorr Syndrome; Hypohidrotic X-linked ectodermal dysplasia; Banter syndrome types 3, 3 with hypocalciuria, and 4; Carbonic anhydrase VA deficiency, hyperammonemia due to; Cardiomyopathy; Poikiloderma, hereditary fibrosing, with tendon contractures, myopathy, and pulmonary fibrosis; Combined d-2- and 1-2-hydroxyglutaric aciduria, Arginase deficiency; Cone-rod dystrophy 2 and 6, Smith-Lemli-Opitz syndrome; Mucolipidosis III Gamma; Blau syndrome; Weiner syndrome; Meningioma; Iodotyrosyl coupling defect, Dubin-Johnson syndrome; 3-Oxo-5 alpha-steroid delta 4-dehydrogenase deficiency; Boucher Neuhauser syndrome; Iron accumulation in brain; Mental Retardation, X-Linked 102 and syndromic 13; familial, Pituitary adenoma predisposition; Hypoplasia of the corpus callosum; Hyperalphalipoproteinemia 2; Deficiency of ferroxidase; Growth hormone insensitivity with immunodeficiency; Marinesco-Sj\xc3\xb6gren syndrome; Martsolf syndrome; Gaze palsy, familial horizontal, with progressive scoliosis; Mitchell-Riley syndrome; Hypocalciuric hypercalcemia, familial, types 1 and 3; Rubinstein-Taybi syndrome; Epstein syndrome; Juvenile retinoschisis; Becker muscular dystrophy; Loeys-Dietz syndrome 1, 2, 3; Congenital muscular hypertrophy-cerebral syndrome; Familial juvenile gout; Spermatogenic failure 11, 3, and 8; Orofacial cleft 11 and 7, Cleft lip/palate-ectodermal dysplasia syndrome; Mental retardation, X-linked, nonspecific, syndromic, Hedera type, and syndromic, wu type; Combined oxidative phosphorylation deficiencies 1, 3, 4, 12, 15, and 25; Frontotemporal dementia; Kniest dysplasia; Familial cardiomyopathy; Benign familial hematuria; Pheochromocytoma; Aminoglycoside-induced deafness, Gamma-aminobutyric acid transaminase deficiency; Oculocutaneous albinism type IB, type 3, and type 4; Renal coloboma syndrome; CNS hypomyelination, Hennekam lymphangiectasia-lymphedema syndrome 2, Migraine, familial basilar; Distal spinal muscular atrophy, X-linked 3; X-linked periventricular heterotopia; Microcephaly; Mucopolysaccharidosis, MPS-1-H1/S, MPS-II, MPS-III-A, MPS-1I-B, MPS-III-C, MPS-IV-A, MPS-IV-B; Infantile Parkinsonism-dystonia; Frontotemporal dementia with TDP43 inclusions, TARDBP-related; Hereditary diffuse gastric cancer; Sialidosis type I and II; Microcephaly-capillary malformation syndrome; Hereditary breast and ovarian cancer syndrome; Brain small vessel disease with hemorrhage; Non-ketotic hyperglycinemia; Navajo neurohepatopathy; Auriculocondylar syndrome 2, Spastic paraplegia 15, 2, 3, 35, 39, 4, autosomal dominant, 55, autosomal recessive, and 5A; Autosomal recessive cutis laxa type IA and IB; Hemolytic anemia, nonspherocytic, due to glucose phosphate isomerase deficiency; Hutchinson-Gilford syndrome; Familial amyloid nephropathy with urticaria and deafness; Supravalvar aortic stenosis; Diffuse palmoplantar keratoderma, Bothnian type; Holt-Oram syndrome, Coffin Siris/Intellectual Disability; Left-right axis malformations, Rapadilino syndrome; Nanophthalmos 2; Craniosynostosis and dental anomalies; Paragangliomas 1; Snyder Robinson syndrome, Ventricular fibrillation; Activated PI3K-delta syndrome, Howel-Evans syndrome; Larsen syndrome, dominant type; Van Maldergem syndrome 2; MYH-associated polyposis; 6-pymvoyl-tetrahydropterin synthase deficiency; Alagille syndromes 1 and 2; Lymphangiomyomatosis; Muscle eye brain disease; WFSI-Related Disorders; Primary hypertrophic osteoarthropathy, autosomal recessive 2; Infertility; Nestor-Guillermo progeria syndrome; Mitochondrial trifunctional protein deficiency; Hypoplastic left heart syndrome 2; Primary dilated cardiomyopathy; Retinitis pigmentosa; Hirschsprung disease 3; Upshaw-Schulman syndrome; Desbuquois dysplasia 2, Diarrhea 3 (secretory sodium, congenital, syndromic) and 5 (with tufting enteropathy, congenital); Pachyonychia congenita 4 and type 2; Cerebral autosomal dominant and recessive arteriopathy with subcortical infarcts and leukoencephalopathy; Vi tel 1i form dystrophy; type II, type IV, IV (combined hepatic and myopathic), type V. and type VI; Atypical Rett syndrome; Atrioventricular septal defect 4: Papillon-Lef\xc3\xa8vre syndrome: Leber amaurosis; X-linked hereditary motor and sensory neuropathy, Progressive sclerosing poliodystrophy; Goldmann-Favre syndrome, Renal-hepatic-pancreatic dysplasia; Pallister-Hall syndrome; Amyloidogenic transthyretin amyloidosis; Melnick-Needles syndrome; Hyperimmunoglobulin E syndrome; Posterior column ataxia with retinitis pigmentosa; Chondrodysplasia punctata 1. X-linked recessive and 2 X-linked dominant: Ectopia lentis, isolated autosomal recessive and dominant; Familial cold urticarial; Familial adenomatous polyposis 1 and 3; Porokeratosis 8, disseminated superficial actinic type; PIK3CA Related Overgrowth Spectrum; Cerebral cavernous malformations 2; Exudative vitreoretinopathy 6; Megalencephaly cutis marmorata telangiectatica congenital, TARP syndrome; Diabetes mellitus, permanent neonatal, with neurologic features; Short-rib thoracic dysplasia 11 or 3 with or without polydactyly; Hypertrichotic osteochondrodysplasia, beta Thalassemia; Niemann-Pick disease type C1, C2, type A, and type Cl, adult form; Charcot-Marie-Tooth disease types IB, 2B2, 2C, 2F, 21, 2U (axonal), IC (demyelinating), dominant intermediate C, recessive intermediate A, 2A2, 4C, 4D, 4H, IF, IVF, and X; Tyrosinemia type I; Paroxysmal atrial fibrillation; UV-sensitive syndrome; Tooth agenesis, selective, 3 and 4; Merosin deficient congenital muscular dystrophy; Long-chain 3-hydroxvacyl-CoA dehydrogenase deficiency; Congenital aniridia; Left ventricular noncompaction 5; Deficiency of aromatic-L-amino-acid decarboxylase; Coronary heart disease; Leukonychia totalis, Distal arthrogryposis type 2B; Retinitis pigmentosa 10, 11, 12, 14, 15, 17, and 19; Robinow Sorauf syndrome; Tenorio Syndrome, Prolactinoma; Neurofibromatosis, type land type 2, Congenital muscular dystrophy-dystroglycanopathy with brain and eye anomalies, types A2, A7, A8, A11, and A14; Heterotaxy, visceral, 2, 4, and 6, autosomal; Jankovic Rivera syndrome; Lipodystrophy, familial partial, type 2 and 3; Hemoglobin H disease, nondeletional; Multicentric osteolysis, nodulosis and arthropathy; Thyroid agenesis; deficiency of Acyl-CoA dehydrogenase family, member 9; Alexander disease; Phytanic acid storage disease; Breast-ovarian cancer, familial 1, 2, and 4; Proline dehydrogenase deficiency; Childhood hypophosphatasia; Pancreatic agenesis and congenital heart disease; Vitamin D-dependent rickets, types land 2; Iridogoniodysgenesis dominant type and type 1; Autosomal recessive hypohidrotic ectodermal dysplasia syndrome; Mental retardation, X-linked, 3, 21, 30, and 72; Hereditary hemorrhagic telangiectasia type 2; Blepharophimosis, ptosis, and epicanthus inversus; Adenine phosphoribosyltransferase deficiency; Seizures, benign familial infantile, 2; Acrodysostosis 2, with or without hormone resistance; Tetralogy of Fallot; Retinitis pigmentosa 2, 20, 25, 35, 36, 38, 39, 4, 40, 43, 45, 48, 66, 7, 70, 72; Lysosomal acid lipase deficiency; Eichsfeld type congenital muscular dystrophy; Walker-Warburg congenital muscular dystrophy; TNF receptor-associated periodic fever syndrome (TRAPS), Progressive myoclonus epilepsy with ataxia, Epilepsy, childhood absence 2, 12 (idiopathic generalized, susceptibility to) 5 (nocturnal frontal lobe), nocturnal frontal lobe type 1, partial, with variable foci, progressive myoclonic 3, and X-linked, with variable learning disabilities and behavior disorders; Long QT syndrome; Dicarboxylic aminoaciduria; Brachydactyly types A1 and A2, Pseudoxanthoma elasticum-like disorder with multiple coagulation factor deficiency; Multisystemic smooth muscle dysfunction syndrome; Syndactyly Cenani Lenz type; Joubert syndrome 1, 6, 7, 9/15 (digenic), 14, 16, and 17, and Orofaciodigital syndrome xiv; Digitorenocerebral syndrome; Retinoblastoma, Dyskinesia, familial, with facial myokymia; Hereditary sensory and autonomic neuropathy type IIB add IIA; familial hyperinsulinism; Megalencephalic leukoencephalopathy with subcortical cysts land 2a; Aase syndrome; Wiedemann-Steiner syndrome; Ichthyosis exfoliativa; Myotonia congenital, Granulomatous disease, chronic, X-linked, variant, Deficiency of 2-methylbutyryl-CoA dehydrogenase; Sarcoidosis, early-onset; Glaucoma, congenital and Glaucoma, congenital, Coloboma; Breast cancer, susceptibility to; Ceroid lipofuscinosis neuronal 2, 6, 7, and 10; Congenital generalized lipodystrophy type 2; Fructose-biphosphatase deficiency; Congenital contractural arachnodactyly; Lynch syndrome I and II; Phosphoglycerate dehydrogenase deficiency, Burn-Mckeown syndrome; Myocardial infarction 1; Achromatopsia 2 and 7; Retinitis Pigmentosa 73; Protan defect; Polymicrogyria, asymmetric, bilateral frontoparietal; Spinal muscular atrophy, distal, autosomal recessive, 5; Methylmalonic aciduria due to methylmalonvl-CoA mutase deficiency; Familial porencephaly; Hurler syndrome; Oto-palato-digital syndrome, types I and II; Sotos syndrome 1 or 2, Cardioencephalomyopathy, fatal infantile, due to cytochrome c oxidase deficiency; Parastremmatic dwarfism; Thyrotropin releasing hormone resistance, generalized; Diabetes mellitus, type 2, and insulin-dependent, 20; Thoracic aortic aneurysms and aortic dissections, Estrogen resistance; Maple syrup urine disease type 1A and type 3; Hypospadias 1 and 2, X-linked; Metachromatic leukodystrophy juvenile, late infantile, and adult types; Early T cell progenitor acute lymphoblastic leukemia; Neuropathy, Hereditary Sensory, Type IC; Mental retardation, autosomal dominant 31; Retinitis pigmentosa 39; Breast cancer, early-onset; May-Hegglin anomaly; Gaucher disease type 1 and Subacute neuronopathic; Temtamy syndrome; Spinal muscular atrophy, lower extremity predominant 2, autosomal dominant; Fanconi anemia, complementation group F, I, N, and O, Alkaptonuria; Hirschsprung disease; Combined malonic and methylmalonic aciduria; Arrhythmogenic right ventricular cardiomyopathy types 5, 8, and 10; Congenital lipomatous overgrowth, vascular malformations, and epidermal nevi; Timothy syndrome; Deficiency of guanidinoacetate methyltransferase; Myoclonic dystonia; Kanzaki disease; Neutral 1 amino acid transport defect; Neurohypophyseal diabetes insipidus; Thyroid hormone metabolism, abnormal; Benign scapuloperoneal muscular dystrophy with cardiomyopathy, Hypoglycemia with deficiency of glycogen synthetase in the liver; Hypertrophic cardiomyopathy; Myasthenic Syndrome, Congenital, 11, associated with acetylcholine receptor deficiency; Mental retardation X-linked syndromic 5, Stormorken syndrome, Aplastic anemia; Intellectual disability, Normokalemic periodic paralysis, potassium-sensitive; Danon disease; Nephronophthisis 13, 15 and 4; Thyrotoxic periodic paralysis and Thyrotoxic periodic paralysis 2; Infertility associated with multi-tailed spermatozoa and excessive DNA; Glaucoma, primary open angle, juvenile-onset; Afibrinogenemia and congenital Afibrinogenemia; Polycystic kidney disease 2, adult type, and infantile type; Familial porphyria cutanea tarda; Cerebello-oculo-renal syndrome (nephronophthisis, oculomotor apraxia and cerebellar abnormalities); Frontotemporal Dementia Chromosome 3-Linked and Frontotemporal dementia ubiquitin-positive; Metatrophic dysplasia; Immunodeficiency-centromeric instability-facial anomalies syndrome 2; Anemia, nonspherocytic hemolytic, due to G6PD deficiency, Bronchiectasis with or without elevated sweat chloride 3; Congenital myopathy with fiber type disproportion: Carney complex, type 1; Cryptorchidism, unilateral or bilateral; Ichthyosis bullosa of Siemens: Isolated lutropin deficiency; DFNA 2 Nonsyndromic Hearing Loss; Klein-Waardenberg syndrome; Gray platelet syndrome; Bile acid synthesis defect, congenital, 2, 46, XY sex reversal, type 1, 3, and 5; Acute intermittent porphyria; Cornelia de Fange syndromes 1 and 5; Hyperglycinuria; Cone-rod dystrophy 3; Dysfibrinogenemia; Karak syndrome; Congenital muscular dystrophy-dystroglycanopathy without mental retardation, type B5; Infantile nystagmus, X-linked; Dyskeratosis congenita, autosomal recessive, 1, 3, 4, and 5; Microcephaly with or without chorioretinopathy, lymphedema, or mental retardation; Hyperlysinemia; Bardet-Biedl syndromes 1, 11, 16, and 19; Autosomal recessive centronuclear myopathy; Frasier syndrome; Caudal regression syndrome; Fibrosis of extraocular muscles, congenital, 1, 2, 3a (with or without extraocular involvement), 3b; Prader-Willi-like syndrome; Malignant melanoma; Bloom syndrome; Darier disease, segmental, Multicentric osteolysis nephropathy; Hemochromatosis type 1, 2B, and 3; Cerebellar ataxia infantile with progressive external ophthalmoplegi and Cerebellar ataxia, mental retardation, and dysequilibrium syndrome 2; Hypoplastic left heart syndrome; Epilepsy, Hearing Loss, And Mental Retardation Syndrome; Transferrin serum level quantitative trait locus 2; Ocular albinism, type I; Marfan syndrome; Congenital muscular dystrophy-dystroglycanopathy with brain and eye anomalies, type A14 and B14; Hyperammonemia, type III; Cryptophthalmos syndrome; Alopecia universalis congenital; Adult hypophosphatasia; Mannose-binding protein deficiency; Bull eye macular dystrophy, Autosomal dominant torsion dystonia 4; Nephrotic syndrome, type 3, type 5, with or without ocular abnormalities, type 7, and type 9; Seizures, Early infantile epileptic encephalopathy 7; Persistent hyperinsulinemic hypoglycemia of infancy; Thrombocytopenia, X-linked; Neonatal hypotonia; Orstavik Lindemann Solberg syndrome; Pulmonary hypertension, primary, 1, with hereditary hemorrhagic telangiectasia; Pituitary dependent hypercortisolism; Epidermodysplasia verruciformis, Epidermolysis bullosa, junctional, localisata variant; Cytochrome c oxidase i deficiency; Kindler syndrome; Myosclerosis, autosomal recessive; Truncus arteriosus; Duane syndrome type 2; ADULT syndrome; Zellweger syndrome spectrum; Leukoencephalopathy with ataxia, with Brainstem and Spinal Cord Involvement and Lactate Elevation, with vanishing white matter, and progressive, with ovarian failure; Antithrombin III deficiency; Holoprosencephaly 7; Roberts-SC phocomelia syndrome, Mitochondrial DNA-depletion syndrome 3 and 7, hepatocerebral types, and 13 (encephalomyopathic type); Porencephaly 2; Microcephaly, normal intelligence and immunodeficiency; Giant axonal neuropathy; Sturge-Weber syndrome, Capillary malformations, congenital, 1; Fabry disease and Fabry disease, cardiac variant; Glutamate formiminotransferase deficiency, Fanconi-Bickel syndrome, Acromicric dysplasia; Epilepsy, idiopathic generalized, susceptibility to, 12; Basal ganglia calcification, idiopathic, 4; Polyglucosan body myopathy 1 with or without immunodeficiency; Malignant tumor of prostate; Congenital ectodermal dysplasia of face; Congenital heart disease; Age-related macular degeneration 3, 6, 11, and 12; Congenital myotonia, autosomal dominant and recessive forms; Hypomagnesemia 1, intestinal; Sulfite oxidase deficiency, isolated; Pick disease; Plasminogen deficiency, type 1; Syndactyly type 3; Cone-rod dystrophy amelogenesis imperfecta; Pseudoprimary hyperaldosteronism; Terminal osseous dysplasia; Bartter syndrome antenatal type 2; Congenital muscular dystrophy-dystroglycanopathy with mental retardation, types B2, B3, B5, and B15; Familial infantile myasthenia; Lymphoproliferative syndrome 1, 1 (X-linked), and 2; Hypercholesterolaemia and Hypercholesterolemia, autosomal recessive; Neoplasm of ovary; Infantile GM1 gangliosidosis; Syndromic X-linked mental retardation 16; Deficiency of ribose-5-phosphate isomerase; Alzheimer disease, types, 1, 3, and 4; Andersen Tawil syndrome; Multiple synostoses syndrome 3; Chilbain lupus 1; Hemophagocytic lymphohistiocytosis, familial, 2; Axenfeld-Rieger syndrome type 3; Myopathy, congenital with cores; Osteoarthritis with mild chondrodysplasia, Peroxisome biogenesis disorders; Severe congenital neutropenia; Hereditary neuralgic amyotrophy; Palmoplantar keratoderma, nonepidermolytic, focal or diffuse: Dysplasminogenemia; Familial colorectal cancer: Spastic ataxia 5, autosomal recessive, Charlevoix-Saguenay type, 1, 10, or 11, autosomal recessive, Frontometaphyseal dysplasia land 3; Hereditary factors II, IX, VIII deficiency disease; Spondylocheirodysplasia, Ehlers-Danlos syndrome-like, with immune dysregulation, Aggrecan type, with congenital joint dislocations, short limb-hand type, Sedaghatian type, with cone-rod dystrophy, and Kozlowski type; Ichthyosis prematurity syndrome; Stickler syndrome type 1; Focal segmental glomerulosclerosis 5; 5-Oxoprolinase deficiency; Microphthalmia syndromic 5, 7, and 9; Juvenile polyposis/hereditary hemorrhagic telangiectasia syndrome; Deficiency of butyryl-CoA dehydrogenase, Maturity-onset diabetes of the young, type 2; Mental retardation, syndromic, Claes-Jensen type, X-linked; Deafness, cochlear, with myopia and intellectual impairment, without vestibular involvement, autosomal dominant, X-linked 2, Spondylocarpotarsal synostosis syndrome; Sting-associated vasculopathy, infantile-onset; Neutral lipid storage disease with myopathy; Immune dysfunction with T-cell inactivation due to calcium entry defect 2; Cardiofaciocutaneous syndrome; Corticosterone methyloxidase type 2 deficiency; Hereditary myopathy with early respiratory failure; Interstitial nephritis, karyomegalic; Trimethylaminuria; Hyperimmunoglobulin D with periodic fever; Malignant hyperthermia susceptibility type 1; Trichomegaly with mental retardation, dwarfism and pigmentary degeneration of retina; Breast adenocarcinoma; Complement factor B deficiency; Ullrich congenital muscular dystrophy, Left ventricular noncompaction cardiomyopathy; Fish-eye disease; Finnish congenital nephrotic syndrome; Limb-girdle muscular dystrophy, type IB, 2A, 2B, 2), C1, C5, C9, C4; Idiopathic fibrosing alveolitis, chronic form; Primary familial hypertrophic cardiomyopathy; Angiotensin i-converting enzyme, benign serum increase; Cd8 deficiency, familial; Proteus syndrome; Glucose-6-phosphate transport defect; Borjeson-Forssman-Lehmann syndrome; Zellweger syndrome; Spinal muscular atrophy, type II; Prostate cancer, hereditary, 2; Thrombocytopenia, platelet dysfunction, hemolysis, and imbalanced globin synthesis; Congenital disorder of glycosylation types IB, ID, IG, IH, IJ, IK, IN, IP, 2C, 2J, 2K, Ilm, Junctional epidermolysis bullosa gravis of Herlitz; Generalized epilepsy with febrile seizures plus 3, type 1, type 2; Schizophrenia 4; Coronary artery disease, autosomal dominant 2; Dyskeratosis congenita, autosomal dominant, 2 and 5; Subcortical laminar heterotopia, X-linked: Adenylate kinase deficiency; X-linked severe combined immunodeficiency; Coproporphyria, Amyloid Cardiomyopathy, Transthyretin-related; Hypocalcemia, autosomal dominant 1; Brugada syndrome; Congenital myasthenic syndrome, acetazolamide-responsive; Primary hypomagnesemia; Sclerosteosis; Frontotemporal dementia and/or amyotrophic lateral sclerosis 3 and 4; Mevalonic aciduria; Schwannomatosis 2; Hereditary motor and sensory neuropathy with optic atrophy; Porphyria cutanea tarda; Osteochondritis dissecans; Seizures, benign familial neonatal, 1, and/or mvokymia; Long QT syndrome, LQT1 subtype; Mental retardation, anterior maxillary protrusion, and strabismus; Idiopathic hypercalcemia of infancy: Hypogonadotropic hypogonadism 11 with or without anosmia; Polycystic lipomembranous osteodysplasia with sclerosing leukoencephalopathy; Primary autosomal recessive microcephaly 10, 2, 3, and 5; Interrupted aortic arch; Congenital amegakaryocytic thrombocytopenia; Hermansky-Pudlak syndrome 1, 3, 4, and 6; Long QT syndrome 1, 2, 2/9, 2/5, (digenic), 3, 5 and 5, acquired, susceptibility to; Andermann syndrome; Retinal cone dystrophy 3B, Erythropoietic protoporphyria; Sepiapterin reductase deficiency; Very long chain acyl-CoA dehydrogenase deficiency; Hyperferritinemia cataract syndrome, Silver spastic paraplegia syndrome; Charcot-Marie-Tooth disease; Atrial septal defect 2; Carnevale syndrome; Hereditary insensitivity to pain with anhidrosis; Catecholaminergic polymorphic ventricular tachycardia; Hypokalemic periodic paralysis 1 and 2; Sudden infant death syndrome; Hypochromic microcytic anemia with iron overload: GLUT1 deficiency syndrome 2; Leukodystrophy, Hypomyelinating, 11 and 6; Cone monochromatism; Osteopetrosis autosomal dominant type 1 and 2, recessive 4, recessive 1, recessive 6; Severe congenital neutropenia 3, autosomal recessive or dominant; Methionine adenosyltransferase deficiency, autosomal dominant; Paroxysmal familial ventricular fibrillation; Pyruvate kinase deficiency of red cells; Schneckenbecken dvsplasia; Torsades de pointes; Distal myopathy Markesbery-Griggs type; Deficiency of UDPglucose-hexose-1-phosphate uridylyltransferase; Sudden cardiac death; Neu-Laxova syndrome 1; Atransferrinemia; Hyperparathyroidism 1 and 2; Cutaneous malignant melanoma 1; Symphalangism, proximal, 1b; Progressive pseudorheumatoid dysplasia; Werdnig-Hoffmann disease; Achondrogenesis type 2; Holoprosencephaly 2, 3, 7, and 9; Schindler disease, type 1, Cerebroretinal microangiopathy with calcifications and cysts; Heterotaxy, visceral, X-linked; Tuberous sclerosis syndrome; Kartagener syndrome, Thyroid hormone resistance, generalized, autosomal dominant; Bestrophinopathy, autosomal recessive; Nail disorder, nonsyndromic congenital, 8; Mohr-Tranebjaerg syndrome; Cone-rod dystrophy 12, Hearing impairment, Ovarioleukodystrophy; Renal tubular acidosis, proximal, with ocular abnormalities and mental retardation; Dihydropteridine reductase deficiency; Focal epilepsy with speech disorder with or without mental retardation; Ataxia-telangiectasia syndrome; Brown-Vialetto-Van laere syndrome and Brown-Vialetto-Van Laere syndrome 2; Cardiomyopathy; Peripheral demyelinating neuropathy, central dysmyelination; Comeal dystrophy, Fuchs endothelial, 4; Cowden syndrome 3; Dystonia 2 (torsion, autosomal recessive), 3 (torsion, X-linked), 5 (Dopa-responsive type), 10, 12, 16, 25, 26 (Myoclonic), Epiphyseal dysplasia, multiple, with myopia and conductive deafness, Cardiac conduction defect, nonspecific; Branchiootic syndromes 2 and 3; Peroxisome biogenesis disorder 14B, 2A, 4A, 5B, 6A, 7A, and 7B; Familial renal glucosuria; Candidiasis, familial, 2, 5, 6, and 8; Autoimmune disease, multisystem, infantile-onset, Early infantile epileptic encephalopathy 2, 4, 7, 9, 10, 11, 13, and 14; Segawa syndrome, autosomal recessive; Deafness, autosomal dominant 3a, 4, 12, 13, 15, autosomal dominant nonsyndromic sensorineural 17, 20, and 65; Congenital dyservthropoietic anemia, type I and II; Enhanced s-cone syndrome; Adult neuronal ceroid lipofuscinosis; Atrial fibrillation, familial, 11, 12, 13, and 16, Norum disease; Osteosarcoma; Partial albinism; Biotinidase deficiency; Combined cellular and humoral immune defects with granulomas, Alpers encephalopathy; Holocarboxylase synthetase deficiency; Maturity-onset diabetes of the young, type 1, type 2, type I1, type 3, and type 9; Variegate porphyria; Infantile cortical hyperostosis; Testosterone 17-beta-dehydrogenase deficiency; L-2-hydroxyglutaric aciduria; Tyrosinase-negative oculocutaneous albinism, Primary ciliary dyskinesia 24; Pontocerebellar hypoplasia type 4; Ciliary dyskinesia, primary, 7, 11, 15, 20 and 22; Idiopathic basal ganglia calcification 5, Brain atrophy; Craniosynostosis 1 and 4; Keratoconus 1; Rasopathy; Congenital adrenal hyperplasia and Congenital adrenal hypoplasia, X-linked; Mitochondrial DNA depletion syndrome 11, 12 (cardiomyopathic type), 2, 4B (MNGIE type), 8B (MNGIE type); Brachydactyly with hypertension; Cornea plana 2; Aarskog syndrome; Multiple epiphyseal dysplasia 5 or Dominant; Comeal endothelial dystrophy type 2; Aminoacylase 1 deficiency; Delayed speech and language development; Nicolaides-Baraitser syndrome, Enterokinase deficiency; Ectrodactyly, ectodermal dysplasia, and cleft lip/palate syndrome 3; Arthrogryposis multiplex congenita, distal, X-linked; Perrault syndrome 4; Jervell and Lange-Nielsen syndrome 2; Hereditary Nonpolyposis Colorectal Neoplasms; Robinow syndrome, autosomal recessive, autosomal recessive, with brachy-syn-polydactyly; Neurofibrosarcoma, Cytochrome-c oxidase deficiency; Vesicoureteral reflux 8; Dopamine beta hydroxylase deficiency; Carbohydrate-deficient glycoprotein syndrome type I and II; Progressive familial intrahepatic cholestasis 3; Benign familial neonatal-infantile seizures; Pancreatitis, chronic, susceptibility to; Rhizomelic chondrodysplasia punctata type 2 and type 3; Disordered steroidogenesis due to cytochrome p450 oxidoreductase deficiency; Deafness with labyrinthine aplasia microtia and microdontia (FAMM); Rothmund-Thomson syndrome, Cortical dysplasia, complex, with other brain malformations 5 and 6; Myasthenia, familial infantile, 1; Trichorhinophalangeal dysplasia type 1; Worth disease; Splenic hypoplasia; Molybdenum cofactor deficiency, complementation group A; Sebastian syndrome; Progressive familial intrahepatic cholestasis 2 and 3; Weill-Marchesani syndrome 1 and 3; Microcephalic osteodysplastic primordial dwarfism type 2; Surfactant metabolism dysfunction, pulmonary, 2 and 3; Severe X-linked myotubular myopathy; Pancreatic cancer 3; Platelet-type bleeding disorder 15 and 8; Tyrosinase-positive oculocutaneous albinism; Borrone Di Rocco Crovato syndrome; ATR-X syndrome; Sucrase-isomaltase deficiency; Complement component 4, partial deficiency of, due to dysfunctional cl inhibitor; Congenital central hypoventilation; Infantile hypophosphatasia; Plasminogen activator inhibitor type I deficiency; Malignant lymphoma, non-Hodgkin; Hyperornithinemia-hyperammonemia-homocitrullinuria syndrome; Schwartz Jampel syndrome type 1; Fetal hemoglobin quantitative trait locus 1; Myopathy, distal, with anterior tibial onset; Noonan syndrome 1 and 4, LEOPARD syndrome 1; Glaucoma 1, open angle, e, F, and G; Kenny-Caffey syndrome type 2; PTEN hamartoma tumor syndrome, Duchenne muscular dystrophy; Insulin-resistant diabetes mellitus and acanthosis nigricans; Microphthalmia, isolated 3, 5, 6, 8, and with coloboma 6; Raine syndrome; Premature ovarian failure 4, 5, 7, and 9; Allan-Hemdon-Dudley syndrome; Citrullinemia type 1; Alzheimer disease, familial, 3, with spastic paraparesis and apraxia; Familial hemiplegic migraine types 1 and 2; Ventriculomegaly with cystic kidney disease; Pseudoxanthoma elasticum: Homocysteinemia due to MTHFR deficiency, CBS deficiency, and Homocystinuria, pyridoxine-responsive; Dilated cardiomyopathy 1A, 1AA, 1C, 1G, IBB, 1DD, IFF, 1HH, II, IKK, IN, IS, 1Y, and 3B; Muscle AMP guanine oxidase deficiency; Familial cancer of breast: Hereditary sideroblastic anemia; Myoglobinuria, acute recurrent, autosomal recessive; Neuroferritinopathy; Cardiac arrhythmia; Glucose transporter type 1 deficiency syndrome; Holoprosencephaly sequence; Angiopathy, hereditary, with nephropathy, aneurysms, and muscle cramps; Isovaleryl-CoA dehydrogenase deficiency; Kallmann syndrome 1, 2, and 6, Permanent neonatal diabetes mellitus; Acrocallosal syndrome, Schinzel type; Gordon syndrome; MYH9 related disorders; Donnai Barrow syndrome; Severe congenital neutropenia and 6, autosomal recessive; Charcot-Marie-Tooth disease, types ID and IVF, Coffin-Lowry syndrome; mitochondrial 3-hydroxy-3-methylglutaryl-CoA synthase deficiency; Hypomagnesemia, seizures, and mental retardation; Ischiopatellar dysplasia; Multiple congenital anomalies-hypotonia-seizures syndrome 3; Spastic paraplegia 50, autosomal recessive; Short stature with nonspecific skeletal abnormalities; Severe myoclonic epilepsy in infancy; Propionic academia; Adolescent nephronophthisis; Macrocephaly, macrosomia, facial dysmorphism syndrome; Stargardt disease 4: Ehlers-Danlos syndrome type 7 (autosomal recessive), classic type, type 2 (progeroid), hydroxylysine-deficient, type 4, type 4 variant, and due to tenascin-X deficiency; Myopia 6; Coxa plana; Familial cold autoinflammatory syndrome 2; Malformation of the heart and great vessels; von Willebrand disease type 2M and type 3, Deficiency of galactokinase; Brugada syndrome 1; X-linked ichthyosis with steryl-sulfatase deficiency; Congenital ocular coloboma; Histiocytosis-lymphadenopathy plus syndrome; Aniridia, cerebellar ataxia, and mental retardation; Left ventricular noncompaction 3; Amyotrophic lateral sclerosis types 1, 6, 15 (with or without frontotemporal dementia), 22 (with or without frontotemporal dementia), and 10, Osteogenesis imperfecta type 12, type 5, type 7, type 8, type I, type 111, with normal sclerae, dominant form, recessive perinatal lethal: Hematologic neoplasm: Favism, susceptibility to; Pulmonary Fibrosis And/Or Bone Marrow Failure, Telomere-Related, 1 and 3, Dominant hereditary optic atrophy, Dominant dystrophic epidermolysis bullosa with absence of skin; Muscular dystrophy, congenital, megaconial type; Multiple gastrointestinal atresias; McCune-Albright syndrome, Nail-patella syndrome: McLeod neuroacanthocytosis syndrome: Common variable immunodeficiency 9; Partial hypoxanthine-guanine phosphoribosyltransferase deficiency; Pseudohypoaldosteronism type 1 autosomal dominant and recessive and type 2; Urocanate hydratase deficiency; Heterotopia; Meckel syndrome type 7; Ch\xc3\xa9diak-Higashi syndrome, Chediak-Higashi syndrome, adult type; Severe combined immunodeficiency due to ADA deficiency, with microcephaly, growth retardation, and sensitivity to ionizing radiation, atypical, autosomal recessive, T cell-negative, B cell-positive, NK cell-negative of NK-positive; Insulin resistance; Deficiency of steroid 11-beta-monooxygenase; Popliteal pterygium syndrome; Pulmonary arterial hypertension related to hereditary hemorrhagic telangiectasia; Deafness, autosomal recessive 1A, 2, 3, 6, 8, 9, 12, 15, 16, 18b, 22, 28, 31, 44, 49, 63, 77, 86, and 89; Primary hyperoxaluria, type I, type, and type III; Paramyotonia congenita of von Eulenburg; Desbuquois syndrome; Carnitine palmitoyltransferase I, II, II (late onset), and II (infantile) deficiency, Secondary hypothyroidism; Mandibulofacial dysostosis, Treacher Collins type, autosomal recessive; Cowden syndrome 1; Li-Fraumeni syndrome 1; Asparagine synthetase deficiency; Malattia leventinese; Optic atrophy 9; Infantile convulsions and paroxysmal choreoathetosis, familial; Ataxia with vitamin E deficiency; Islet cell hyperplasia; Miyoshi muscular dystrophy 1; Thrombophilia, hereditary, due to protein C deficiency, autosomal dominant and recessive; Fechtner syndrome; Properdin deficiency, X-linked; Mental retardation, stereotypic movements, epilepsy, and/or cerebral malformations; Creatine deficiency, X-linked; Pilomatrixoma; Cyanosis, transient neonatal and atypical nephropathic; Adult onset ataxia with oculomotor apraxia; Hemangioma, capillary infantile; PC-K6a; Generalized dominant dystrophic epidermolysis bullosa; Pelizaeus-Merzbacher disease, Myopathy, centronuclear, 1, congenital, with excess of muscle spindles, distal, 1, lactic acidosis, and sideroblastic anemia 1, mitochondrial progressive with congenital cataract, hearing loss, and developmental delay, and tubular aggregate, 2; Benign familial neonatal seizures 1 and 2; Primary pulmonary hypertension: Lymphedema, primary, with myelodysplasia; Congenital long QT syndrome, Familial exudative vitreoretinopathy, X-linked; Autosomal dominant hypohidrotic ectodermal dysplasia; Primordial dwarfism; Familial pulmonary capillary hemangiomatosis; Carnitine acylcamitine translocase deficiency; Visceral myopathy, Familial Mediterranean fever and Familial mediterranean fever, autosomal dominant; Combined partial and complete 17-alpha-hydroxylase, 17, 20-lyase deficiency, Oto-palato-digital syndrome, type I; Nephrolithiasis/osteoporosis, hypophosphatemic, 2; Familial type 1 and 3 hyperlipoproteinemia; Phenotypes; CHARGE association; Fuhrmann syndrome; Hypotrichosis-lymphedema-telangiectasia syndrome; Chondrodysplasia Blomstrand type; Acroerythrokeratoderma; Slowed nerve conduction velocity, autosomal dominant; Hereditary cancer-predisposing syndrome, Craniodiaphyseal dysplasia, autosomal dominant; Spinocerebellar ataxia autosomal recessive 1 and 16; Proprotein convertase 1/3 deficiency; D-2-hydroxyglutaric aciduria 2; Hyperekplexia 2 and Hyperekplexia hereditary; Central core disease; Opitz G/BBB syndrome; Cystic fibrosis; Thiel-Behnke corneal dystrophy; Deficiency of bisphosphoglycerate mutase; Mitochondrial short-chain Enoyl-CoA Hydratase 1 deficiency; Ectodermal dysplasia skin fragility syndrome; Wolfram-like syndrome, autosomal dominant; Microcytic anemia, Pyruvate carboxylase deficiency; Leukocyte adhesion deficiency type I and III, Multiple endocrine neoplasia, types land 4; Transient bullous dermolysis of the newborn; Primrose syndrome; Non-small cell lung cancer; Congenital muscular dystrophy, Lipase deficiency combined; COLE-CARPENTER SYNDROME 2; Atrioventricular septal defect and common atrioventricular junction; Deficiency of xanthine oxidase; Waardenburg syndrome type 1, 4C, and 2E (with neurologic involvement), Stickler syndrome, types I (nonsyndromic ocular) and 4; Comeal fragility keratoglobus, blue sclerae and joint hypermobility; Microspherophakia; Chudley-McCullough syndrome, Epidermolysa bullosa simplex and limb girdle muscular dystrophy, simplex with mottled pigmentation, simplex with pyloric atresia, simplex, autosomal recessive, and with pyloric atresia; Rett disorder; Abnormality of neuronal migration; Growth hormone deficiency with pituitary anomalies; Leigh disease; Keratosis palmoplantaris striata 1; Weissenbacher-Zweymuller syndrome; Medium-chain acyl-coenzyme A dehydrogenase deficiency, UDPglucose-4-epimerase deficiency; susceptibility to Autism, X-linked 3; Rhegmatogenous retinal detachment, autosomal dominant; Familial febrile seizures 8, Ulna and fibula absence of with severe limb deficiency; Left ventricular noncompaction 6; Centromeric instability of chromosomes 1, 9 and 16 and immunodeficiency; Hereditary diffuse leukoencephalopathy with spheroids; Cushing syndrome; Dopamine receptor d2, reduced brain density of; C-like syndrome; Renal dysplasia, retinal pigmentary dystrophy, cerebellar ataxia and skeletal dysplasia; Ovarian dysgenesis 1; Pierson syndrome; Polyneuropathy, hearing loss, ataxia, retinitis pigmentosa, and cataract; Progressive intrahepatic cholestasis; autosomal dominant, autosomal recessive, and X-linked recessive Alport syndromes, Angelman syndrome; Amish infantile epilepsy syndrome; Autoimmune lymphoproliferative syndrome, type la; Hydrocephalus; Marfanoid habitus; Bare lymphocyte syndrome type 2, complementation group E; Recessive dystrophic epidermolysis bullosa; Factor H, VII, X, v and factor viii, combined deficiency of 2, xiii, a subunit, deficiency, Zonular pulverulent cataract 3; Warts, hypogammaglobulinemia, infections, and myelokathexis: Benign hereditary chorea; Deficiency of hyaluronoglucosaminidase; Microcephaly, hiatal hernia and nephrotic syndrome; Growth and mental retardation, mandibulofacial dysostosis, microcephaly, and cleft palate; Lymphedema, hereditary, id: Delayed puberty, Apparent mineralocorticoid excess; Generalized arterial calcification of infancy 2; METHYLMALONIC ACIDURIA, mut(0) TYPE; Congenital heart disease, multiple types, 2; Familial hypoplastic, glomerulocystic kidney, Cerebrooculofacioskeletal syndrome 2, Stargardt disease 1; Mental retardation, autosomal recessive 15, 44, 46, and 5: Prolidase deficiency; Methylmalonic aciduria cblB type; Oguchi disease, Endocrine-cerebroosteodysplasia; Lissencephaly 1, 2 (X-linked), 3, 6 (with microcephaly), X-linked; Somatotroph adenoma; Gamstorp-Wohlfart syndrome; Lipid proteinosis; Inclusion body myopathy 2 and 3, Enlarged vestibular aqueduct syndrome: Osteoporosis with pseudoglioma; Acquired long QT syandrome; Phenylketonuria; CHOPS syndrome; Global developmental delay: Bietti crystalline corneoretinal dystrophy: Noonan syndrome-like disorder with or without juvenile myelomonocytic leukemia: Congenital erythropoietic porphyria; Atrophia bulborum hereditaria; Paragangliomas 3; Van der Woude syndrome, Aromatase deficiency, Birk Barel mental retardation dysmorphism syndrome; Amyotrophic lateral sclerosis type 5; Methemoglobinemia types I 1 and 2: Congenital stationary night blindness, type 1A, IB, 1C, IE, IF, and 2A, Seizures; Thyroid cancer, follicular; Lethal congenital contracture syndrome 6; Distal hereditary motor neuronopathy type 2B; Sex cord-stromal tumor; Epileptic encephalopathy, childhood-onset, early infantile, 1, 19, 23, 25, 30, and 32; Myofibrillar myopathy 1 and ZASP-related; Cerebellar ataxia infantile with progressive external ophthalmoplegia; Purine-nucleoside phosphorylase deficiency: Forebrain defects; Epileptic encephalopathy Lennox-Gastaut type; Obesity; 4, Left ventricular noncompaction 10: Verheij syndrome; Mowat-Wilson syndrome; Odontotrichomelic syndrome; Patterned dystrophy of retinal pigment epithelium; Lig4 syndrome; Barakat syndrome; IRAK4 deficiency, Somatotroph adenoma: Branched-chain ketoacid dehydrogenase kinase deficiency; Cystinuria; Familial aplasia of the vermis; Succinyl-CoA acetoacetate transferase deficiency; Scapuloperoneal spinal muscular atrophy; Pigmentary retinal dystrophy; Glanzmann thrombasthenia; Primary open angle glaucoma juvenile onset 1; Aicardi Goutieres syndromes 1, 4, and 5; Renal dysplasia; Intrauterine growth retardation, metaphyseal dysplasia, adrenal hypoplasia congenita, and genital anomalies; Beaded hair; Short stature, onychodysplasia, facial dysmorphism, and hypotrichosis; Metachromatic leukodystrophy; Cholestanol storage disease; Three M syndrome 2, Leber congenital amaurosis 11, 12, 13, 16, 4, 7, and 9; Mandibuloacral dysplasia with type A or B lipodystrophy, atypical; Meier-Gorlin syndromes land 4; Hypotrichosis 8 and 12, Short QT syndrome 3; Ectodermal dysplasia 1 ib; Anonychia; Pseudohypoparathyroidism type 1A, Pseudopseudohypoparathyroidism; Leber optic atrophy; Bainbridge-Ropers syndrome; Weaver syndrome; Short stature, auditory canal atresia, mandibular hypoplasia, skeletal abnormalities; Deficiency of alpha-mannosidase; Macular dystrophy, vitelliform, adult-onset; Glutaric aciduria, type 1; Gangliosidosis GM1 typel (with cardiac involvement) 3; Mandibuloacral dysostosis; Hereditary lymphedema type I; Atrial standstill 2; Kabuki make-up syndrome; Bethlem myopathy and Bethlem myopathy 2; Myeloperoxidase deficiency; Fleck comeal dystrophy; Hereditary acrodermatitis enteropathica; Hypobetalipoproteinemia, familial, associated with apob32; Cockayne syndrome type A; Hyperparathyroidism, neonatal severe; Ataxia-telangiectasia-like disorder; Pendred syndrome; I blood group system; Familial benign pemphigus; Visceral heterotaxy 5, autosomal; Nephrogenic diabetes insipidus, Nephrogenic diabetes insipidus, X-linked; Minicore myopathy with external ophthalmoplegia; Perry syndrome; hypohidrotic/hair/tooth type, autosomal recessive; Hereditary pancreatitis; Mental retardation and microcephaly with pontine and cerebellar hypoplasia; Glycogen storage disease 0 (muscle), II (adult form), IXa2, IXc, type 1A; Osteopathia striata with cranial sclerosis; Gluthathione synthetase deficiency; Brugada syndrome and Brugada syndrome 4; Endometrial carcinoma; Hypohidrotic ectodermal dysplasia with immune deficiency; Cholestasis, intrahepatic, of pregnancy 3; Bemard-Soulier syndrome, types A1 and A2 (autosomal dominant); Salla disease; Omithine aminotransferase deficiency; PTEN hamartoma tumor syndrome; Distichiasis-lymphedema syndrome; Corticosteroid-binding globulin deficiency; Adult neuronal ceroid lipofuscinosis; Dejerine-Sottas disease; Tetraamelia, autosomal recessive; Senior-Loken syndrome 4 and 5; Glutaric acidemia IIA and IIB; Aortic aneurysm, familial thoracic 4, 6, and 9; Hyperphosphatasia with mental retardation syndrome 2, 3, and 4, Dyskeratosis congenita X-linked; Arthrogryposis, renal dysfunction, and cholestasis 2; Bannayan-Riley-Ruvalcaba syndrome; 3-Methylglutaconic aciduria; Isolated 17,20-lyase deficiency; Gorlin syndrome; Hand foot uterus syndrome; Tay-Sachs disease, B1 variant, Gm2-gangliosidosis (adult), Gm2-gangliosidosis (adult-onset); Dowling-degos disease 4; Parkinson disease 14, 15, 19 (juvenile-onset), 2, 20 (early-onset), 6, (autosomal recessive early-onset, and 9; Ataxia, sensory, autosomal dominant; Congenital microvillous atrophy; Myoclonic-Atonic Epilepsy; Tangier disease; 2-methyl-3-hydroxybutyric aciduria, Familial renal hypouricemia; Schizencephaly; Mitochondrial DNA depletion syndrome 4B, MNGIE type; Feingold syndrome 1, Renal carnitine transport defect, Familial hypercholesterolemia; Townes-Brocks-branchiootorenal-like syndrome; Griscelli syndrome type 3; Meckel-Gruber syndrome; Bullous ichthyosiform erythroderma; Neutrophil immunodeficiency syndrome; Myasthenic Syndrome, Congenital, 17, 2A (slow-channel), 4B (fast-channel), and without tubular aggregates, Microvascular complications of diabetes 7; McKusick Kaufman syndrome; Chronic granulomatous disease, autosomal recessive cytochrome b-positive, types 1 and 2; Arginino succinate lyase deficiency; Mitochondrial phosphate carrier and pyruvate carrier deficiency; Lattice corneal dystrophy Type III; Ectodermal dysplasia-syndactyly syndrome 1; Hypomyelinating leukodystrophy 7; Mental retardation, autosomal dominant 12, 13, 15, 24, 3, 30, 4, 5, 6, and 9; Generalized epilepsy with febrile seizures plus, types I and 2; Psoriasis susceptibility 2; Frank Ter Haar syndrome; Thoracic aortic aneurysms and aortic dissections; Crouzon syndrome; Granulosa cell tumor of the ovary; Epidermolytic palmoplantar keratoderma; Lei Weill dyschondrosteosis; 3 beta-Hydroxysteroid dehydrogenase deficiency, Familial restrictive cardiomyopathy 1; Autosomal dominant progressive external ophthalmoplegia with mitochondrial DNA deletions 1 and 3; Antley-Bixler syndrome with genital anomalies and disordered steroidogenesis; Hajdu-Cheney syndrome; Pigmented nodular adrenocortical disease, primary, 1; Episodic pain syndrome, familial, 3, Dejerine-Sottas syndrome, autosomal dominant; FG syndrome and FG syndrome 4; Dendritic cell, monocyte. B lymphocyte, and natural killer lymphocyte deficiency, Hypothyroidism, congenital, nongoitrous, 1; Miller syndrome; Nemaline myopathy 3 and 9; Oligodontia-colorectal cancer syndrome; Cold-induced sweating syndrome 1; Van Buchem disease type 2; Glaucoma 3, primary congenital, d; Citrullinemia type I and II; Nonaka myopathy; Congenital muscular dystrophy due to partial LAMA2 deficiency; Myoneural gastrointestinal encephalopathy syndrome; Leigh syndrome due to mitochondrial complex I deficiency, Medulloblastoma, Pyruvate dehydrogenase El-alpha deficiency; Carcinoma of colon; Nance-Horan syndrome; Sandhotf disease, adult and infantil types; Arthrogryposis renal dysfunction cholestasis syndrome; Autosomal recessive hypophosphatemic bone disease; Doyne honeycomb retinal dystrophy: Spinocerebellar ataxia 14, 21, 35, 40, and 6; Lewy body dementia; RRM2B-related mitochondrial disease, Brody myopathy; Megalencephaly-polymicrogyria-polydactyly-hydrocephalus syndrome 2; Usher syndrome, types 1, IB, ID, 1G, 2A, 2C, and 2D; hypocalcification type and hypomaturation type, IIA1 Amelogenesis imperfecta; Pituitary hormone deficiency, combined 1, 2, 3, and 4; Cushing symphalangism; Renal tubular acidosis, distal, autosomal recessive, with late-onset sensorineural hearing loss, or with hemolytic anemia; Infantile nephronophthisis: Juvenile polyposis syndrome; Sensory ataxic neuropathy, dysarthria, and ophthalmoparesis, Deficiency of 3-hydroxyacyl-CoA dehydrogenase; Parathyroid carcinoma; X-linked agammaglobulinemia; Megaloblastic anemia, thiamine-responsive, with diabetes mellitus and sensorineural deafness; Multiple sulfatase deficiency; Neurodegeneration with brain iron accumulation 4 and 6; Cholesterol monooxygenase (side-chain cleaving) deficiency; hemolytic anemia due to Adenylosuccinate lyase deficiency; Myoclonus with epilepsy with ragged red fibers; Pitt-Hopkins syndrome; Multiple pterygium syndrome Escobar type; Homocystinuria-Megaloblastic anemia due to defect in cobalamin metabolism, cblE complementation type; Cholecystitis; Spherocytosis types 4 and 5; Multiple congenital anomalies; Xeroderma pigmentosum, complementation group b, group D, group E, and group G; Leiner disease: Groenouw comeal dystrophy type I: Coenzyme Q10 deficiency, primary 1, 4, and 7; Distal spinal muscular atrophy, congenital nonprogressive; Warburg micro syndrome 2 and 4; Bile acid synthesis defect, congenital, 3; Acth-independent macronodular adrenal hyperplasia 2; Acrocapitofemoral dysplasia, Paget disease of bone, familial; Severe neonatal-onset encephalopathy with microcephaly; Zimmermann-Laband syndrome and Zimmermann-Laband syndrome 2; Reifenstein syndrome; Familial hypokalemia-hypomagnesemia; Photosensitive trichothiodystrophy; Adult junctional epidermolysis bullosa; Lung cancer; Freeman-Sheldon syndrome; Hyperinsulinism-hyperammonemia syndrome, Posterior polar cataract type 2; Sclerocornea, autosomal recessive; Juvenile GM>1<gangliosidosis; Cohen syndrome; Hereditary Paraganglioma-Pheochromocytoma Syndromes; Neonatal insulin-dependent diabetes mellitus; Hypochondrogenesis; Floating-Harbor syndrome; Cutis laxa with osteodystrophy and with severe pulmonary, gastrointestinal, and urinary abnormalities; Congenital contractures of the limbs and face, hypotonia, and developmental delay; Dyskeratosis congenita autosomal dominant and autosomal dominant, 3; Histiocytic medullary reticulosis; Costello syndrome; Immunodeficiency 15, 16, 19, 30, 31C, 38, 40, 8, due to defect in cd3-zeta, with hyper IgM type 1 and 2, and X-Linked, with magnesium defect, Epstein-Barr vims infection, and neoplasia; Atrial septal defects 2, 4, and 7 (with or without atrioventricular conduction defects); GTP cyclohydrolase I deficiency; Talipes equinovarus: Phosphoglycerate kinase 1 deficiency; Tuberous sclerosis 1 and 2; Autosomal recessive congenital ichthyosis 1, 2, 3, 4A, and 4B; and Familial hypertrophic cardiomyopathy 1, 2, 3, 4, 7, 10, 23 and 24.

### Indications by Tissue

[0589] Additional suitable diseases and disorders that can be treated by the systems and methods provided herein include, without limitation, diseases of the central nervous system (CNS) (see exemplary diseases and affected genes in Table 13), diseases of the eye (see exemplary diseases and affected genes in Table 14), diseases of the heart (see exemplary diseases and affected genes in Table 15), diseases of the hematopoietic stem cells (HSC) (see exemplary diseases and affected genes in Table 16), diseases of the kidney (see exemplary diseases and affected genes in Table 17), diseases of the liver (see exemplary diseases and affected genes in Table 18), diseases of the lung (see exemplary diseases and affected genes in Table 19), diseases of the skeletal muscle (see exemplary diseases and affected genes in Table 20), and diseases of the skin (see exemplary diseases and affected genes in Table 21). Table 22 provides exemplary protective mutations that reduce risks of the indicated diseases. In some embodiments, a Gene Writer system described herein is used to treat an indication of any of Tables 13-21. In some embodiments, the GeneWriter system modifies a target site in genomic DNA in a cell, wherein the target site is in a gene of any of Tables 13-21, e.g., in a subject having the corresponding indication listed in any of Tables 13-21. In some embodiments, the GeneWriter corrects a mutation in the gene. In some embodiments, the GeneWriter inserts a sequence that had been deleted from the gene (e.g., through a disease-causing mutation). In some embodiments, the GeneWriter deletes a sequence that had been duplicated in the gene (e.g., through a disease-causing mutation). In some embodiments, the GeneWriter replaces a mutation (e.g., a disease-causing mutation) with the corresponding wild-type sequence. In some embodiments, the mutation is a substitution, insertion, deletion, or inversion.

TABLE 13
CNS diseases and genes affected.

| Disease | Gene Affected |
|---|---|
| Alpha-mannosidosis | MAN2B1 |
| Ataxia-telangiectasia | ATM |
| CADASIL | NOTCH3 |
| Canavan disease | ASPA |
| Carbamoyl-phosphate | CPS1 |
| synthetase 1 deficiency | |
| CLN1 disease | PPT1 |
| CLN2 Disease | TPPI |
| CLN3 Disease (Juvenile neuronal ceroid | CLN3 |
| lipofuscinosis, Batten Disease) | |
| Coffin-Lowry syndrome | RPS6KA3 |
| Congenital myasthenic syndrome 5 | COLQ |
| Cornelia de Lange syndrome (NIPBL) | NIPBL |
| Cornelia de Lange syndrome (SMC1A) | SMC1A |
| Dravet syndrome (SCN1A) | SCN1A |
| Glycine encephalopathy (GLDC) | GLDC |
| GM1 gangliosidosis | GLB1 |
| Huntington's Disease | HTT |
| Hydrocephalus with stenosis of | L1CAM |
| the aqueduct of Sylvius | |
| Leigh Syndrome | SURF1 |
| Metachromatic | ARSA |
| leukodystrophy (ARSA) | |
| MPS type 2 | IDS |
| MPS type 3 | Type 3a: SGSH |
| | Type 3b: NAGLU |
| Mucolipidosis IV | MCOLN1 |
| Neurofibromatosis Type 1 | NF1 |
| Neurofibromatosis type 2 | NF2 |
| Pantothenate kinase-associated | PANK2 |
| neurodegeneration | |
| Pyridoxine-dependent epilepsy | ALDH7A1 |
| Rett syndrome (MECP2) | MECP2 |
| Sandhoff disease | HEXB |
| Semantic dementia | MAPT |
| (Frontotemporal dementia) | |
| Spinocerebellar ataxia with axonal neuropathy | SETX |
| (Ataxia with Oculomotor Apraxia) | |
| Tay-Sachs disease | HEXA |
| X-linked Adrenoleukodystrophy | ABCD1 |

TABLE 14
Eye diseases and genes affected.

| Disease | Gene Affected |
|---|---|
| Achromatopsia | CNGB3 |
| Amaurosis Congenita (LCA1) | GUCY2D |
| Amaurosis Congenita (LCA10) | CEP290 |
| Amaurosis Congenita (LCA2) | RPE65 |
| Amaurosis Congenita (LCA8) | CRB1 |
| Choroideremia | CHM |
| Cone Rod Dystrophy (ABCA4) | ABCA4 |
| Cone Rod Dystrophy (CRX) | CRX |
| Cone Rod Dystrophy (GUCY2D) | GUCY2D |
| Cystinosis, Ocular Nonnephropathic | CTNS |
| Lattice corneal dystrophy type I | TGFBI |
| Macular Corneal Dystrophy (MCD) | CHST6 |
| Optic Atrophy | OPA1 |
| Retinitis Pigmentosa (AR) | USH2A |
| Retinitis Rigmentosa (AD) | RHO |
| Stargardt Disease | ABCA4 |
| Vitelliform Macular Dystrophy | BEST1; PRPH2 |

TABLE 15
Heart diseases and genes affected.

| Disease | Gene Affected |
|---|---|
| Arrhythmogenic right ventricular | PKP2 |
| cardiomyopathy (ARVC) | |
| Barth syndrome | TAZ |
| Becker muscular dystrophy | DMD |
| Brugada syndrome | SCN5A |
| Catecholaminergic polymorphic | RYR2 |
| ventricular tachycardia (RYR2) | |
| Dilated cardiomyopathy (LMNA) | LMNA |
| Dilated cardiomyopathy (TTN) | TTN |
| Duchenne muscular dystrophy | DMD |
| Emery-Dreifuss Muscular Dystrophy Type I | EMD |
| Familial hypertrophic cardiomyopathy | MYH7 |
| Familial hypertrophic cardiomyopathy | MYBPC3 |
| Jervell Lange-Nielsen syndrome | KCNQ1 |
| LCHAD deficiency | HADHA |
| Limb-girdle muscular dystrophy type | LMNA |
| 1B (Emery-Dreifuss EDMD2) | |
| Limb-girdle muscular dystrophy, type 2D | SGCA |
| Long QT syndrome 1 (Romano Ward) | KCNQ1 |
| Arrhythmogenic right ventricular | PKP2 |
| cardiomyopathy (ARVC) | |
| Barth syndrome | TAZ |
| Becker muscular dystrophy | DMD |
| Brugada syndrome | SCN5A |
| Catecholaminergic polymorphic | RYR2 |
| ventricular tachycardia (RYR2) | |
| Dilated cardiomyopathy (LMNA) | LMNA |
| Dilated cardiomyopathy (TTN) | TTN |
| Duchenne muscular dystrophy | DMD |
| Emery-Dreifuss Muscular Dystrophy Type I | EMD |
| Familial hypertrophic cardiomyopathy | MYH7 |
| Familial hypertrophic cardiomyopathy | MYBPC3 |
| Jervell Lange-Nielsen syndrome | KCNQ1 |
| LCHAD deficiency | HADHA |
| Limb-girdle muscular dystrophy type | LMNA |
| 1B (Emery-Dreifuss EDMD2) | |
| Limb-girdle muscular dystrophy, type 2D | SGCA |
| Long QT syndrome 1 (Romano Ward) | KCNQ1 |

TABLE 16
HSC diseases and genes affected.

| Disease | Gene Affected |
|---|---|
| ADA-SCID | ADA |
| Adrenoleukodystrophy (CALD) | ABCD1 |
| Alpha-mannosidosis | MAN2B1 |
| Chronic granulomatous disease | CYBB; CYBA; NCF1; |
| | NCF2; NCF4 |
| Common variable immunodeficiency | TNFRSF13B |
| Fanconi anemia | FANCA; FANCC; FANCG |
| Gaucher disease | GBA |
| Globoid cell leukodystrophy | GALC |
| (Krabbe disease) | |
| Hemophagocytic lymphohistiocytosis | PRF1; STX11; STXBP2; |
| | UNC13D |
| IL-7R SCID | IL7R |
| JAK-3 SCID | JAK3 |
| Malignant infantile osteopetrosis- | TCIRG1; Many genes |
| autosomal recessive osteopetrosis | implicated |
| Metachromatic leukodystrophy | ARSA; PSAP |
| MPS 1S (Scheie syndrome) | IDUA |
| MPS2 | IDS |
| MPS7 | GUSB |
| Mucolipidosis II | GNPTAB |
| Niemann-Pick disease A and B | SMPD1 |
| Niemann-Pick disease C | NPC1 |
| Paroxysmal Nocturnal Hemoglobinuria | PIGA |
| Pompe disease | GAA |
| Pyruvate kinase deficiency (PKD) | PKLR |
| RAG 1/2 Deficiency | RAG1/RAG2 |
| (SCID with granulomas) | |
| Severe Congenital Neutropenia | ELANE; HAX1 |
| Sickle cell disease (SCD) | HBB |
| Tay Sachs | HEXA |
| Thalassemia | HBB |
| Wiskott-Aldrich Syndrome | WAS |
| X-linked agammaglobulinemia | BTK |
| X-linked SCID | IL2RG |
| ADA-SCID | ADA |
| Adrenoleukodystrophy (CALD) | ABCD1 |
| Alpha-mannosidosis | MAN2B1 |
| Chronic granulomatous disease | CYBB; CYBA; NCF1; |
| | NCF2; NCF4 |
| Common variable immunodeficiency | TNFRSF13B |
| Fanconi anemia | FANCA; FANCC; FANCG |
| Gaucher disease | GBA |
| Globoid cell leukodystrophy | GALC |
| (Krabbe disease) | |
| Hemophagocytic lymphohistiocytosis | PRF1; STX11; STXBP2; |
| | UNC13D |
| IL-7R SCID | IL7R |
| JAK-3 SCID | JAK3 |
| Malignant infantile osteopetrosis- | TCIRG1; Many genes |
| autosomal recessive osteopetrosis | implicated |
| Metachromatic leukodystrophy | ARSA; PSAP |
| MPS 1S (Scheie syndrome) | IDUA |
| MPS2 | IDS |
| MPS7 | GUSB |
| Mucolipidosis II | GNPTAB |
| Niemann-Pick disease A and B | SMPD1 |
| Niemann-Pick disease C | NPC1 |
| Paroxysmal Nocturnal Hemoglobinuria | PIGA |
| Pompe disease | GAA |
| Pyruvate kinase deficiency (PKD) | PKLR |
| RAG 1/2 Deficiency | RAG1/RAG2 |
| (SCID with granulomas) | |
| Severe Congenital Neutropenia | ELANE; HAX1 |
| Sickle cell disease (SCD) | HBB |
| Tay Sachs | HEXA |
| Thalassemia | HBB |
| Wiskott-Aldrich Syndrome | WAS |
| X-linked agammaglobulinemia | BTK |
| X-linked SCID | IL2RG |

TABLE 17
Kidney diseases and genes affected.

| Disease | Gene Affected |
|---|---|
| Alport syndrome | COL4A5 |
| Autosomal dominant polycystic kidney disease | PKD1 |
| (PKD1) | |
| Autosomal dominant polycystic kidney disease | PDK2 |
| (PKD2) | |
| Autosomal dominant tubulointerstitial kidney disease | MUC1 |
| (MUC1) | |
| Autosomal dominant tubulointerstitial kidney disease | UMOD |
| (UMOD) | |
| Autosomal recessive polycystic kidney disease | PKHD1 |
| Congenital nephrotic syndrome | NPHS2 |
| Cystinosis | CTNS |

TABLE 18
Liver diseases and genes affected.

| Disease | Gene Affected |
|---|---|
| Acute intermittent porphyria | HMBS |
| Alagille syndrome | JAG1 |
| Alpha-1-antitrypsin deficiency | SERPINA1 |
| Carbamoyl phosphate | CPS1 |
| synthetase I deficiency | |
| Citrullinemia I | ASS1 |
| Crigler-Najjar | UGT1A1 |
| Fabry | LPL |
| Familial chylomicronemia syndrome | GLA |
| Gaucher | GBE1 |
| GSD IV | GBA |
| Heme A | F8 |
| Heme B | F9 |
| Hereditary amyloidosis (hTTR) | TTR |
| Hereditary angioedema | SERPING1 |
| | (KLKB1 for CRISPR) |
| HoFH | LDLRAP1 |
| Hypercholesterolemia | PCSK9 |
| Methylmalonic acidemia | MMUT |
| MPS II | IDS |
| MPS III | Type IIIa: SGSH |
| | Type IIIb: NAGLU |
| | Type IIIc: HGSNAT |
| | Type IIId: GNS |
| MPS IV | Type IVA: GALNS |
| | Type IVB: GLB1 |
| MPS VI | ARSB |
| MSUD | Type Ia: BCKDHA |
| | Type Ib: BCKDHB |
| | Type II: DBT |
| OTC Deficiency | OTC |
| Polycystic Liver Disease | PRKCSH |
| Pompe | GAA |
| Primary Hyperoxaluria 1 | AGXT |
| | (HAO1 or LDHA for CRISPR) |
| Progressive familial intrahepatic | ATP8B1 |
| cholestasis type 1 | |
| Progressive familial intrahepatic | ABCB11 |
| cholestasis type 2 | |
| Progressive familial intrahepatic | ABCB4 |
| cholestasis type 3 | |
| Propionic acidemia | PCCB; PCCA |
| Wilson's Disease | ATP7B |
| Glycogen storage disease, Type 1a | G6PC |
| Glycogen storage disease, Type IIIb | AGL |
| Isovaleric acidemia | IVD |
| Wolman disease | LIPA |

TABLE 19
Lung diseases and genes affected.

| Disease | Gene Affected |
|---|---|
| Alpha-1 antitrypsin deficiency | SERPINA1 |
| Cystic fibrosis | CFTR |
| Primary ciliary dyskinesia | DNAI1 |
| Primary ciliary dyskinesia | DNAH5 |
| Primary pulmonary hypertension I | BMPR2 |
| Surfactant Protein B (SP-B) Deficiency | SFTPB |
| (pulmonary surfactant metabolism dysfunction 1) | |

TABLE 20
Skeletal muscle diseases and genes affected.

| Disease | Gene Affected |
|---|---|
| Becker muscular dystrophy | DMD |
| Becker myotonia | CLCN1 |
| Bethlem myopathy | COL6A2 |
| Centronuclear myopathy, X-linked (myotubular) | MTM1 |
| Congenital myasthenic syndrome | CHRNE |
| Duchenne muscular dystrophy | DMD |
| Emery-Dreifuss muscular dystrophy, AD | LMNA |
| Facioscapulohumeral Muscular Dystrophy | DUX4-D4Z4 |
| | chromosomal region |
| Hyperkalemic periodic paralysis | SCN4A |
| Hypokalemic periodic paralysis | CACNA1S |
| Limb-girdle muscular dystrophy 2A | CAPN3 |
| Limb-girdle muscular dystrophy 2B | DYSF |
| Limb-girdle muscular dystrophy, type 2D | SGCA |
| Miyoshi muscular dystrophy 1 | DYSF |
| Paramyotonia congenita | SCN4A |
| Thomsen myotonia | CLCN1 |
| VCP myopathy (IBMPFD) 1 | VCP |
| Becker muscular dystrophy | DMD |
| Becker myotonia | CLCN1 |
| Bethlem myopathy | COL6A2 |
| Centronuclear myopathy, X-linked (myotubular) | MTM1 |
| Congenital myasthenic syndrome | CHRNE |
| Duchenne muscular dystrophy | DMD |
| Emery-Dreifuss muscular dystrophy, AD | LMNA |
| Facioscapulohumeral Muscular Dystrophy | DUX4-D4Z4 |
| | chromosomal region |
| Hyperkalemic periodic paralysis | SCN4A |
| Hypokalemic periodic paralysis | CACNA1S |
| Limb-girdle muscular dystrophy 2A | CAPN3 |
| Limb-girdle muscular dystrophy 2B | DYSF |
| Limb-girdle muscular dystrophy, type 2D | SGCA |
| Miyoshi muscular dystrophy 1 | DYSF |
| Paramyotonia congenita | SCN4A |
| Thomsen myotonia | CLCN1 |
| VCP myopathy (IBMPFD) 1 | VCP |

TABLE 21
Skin diseases and genes affected.

| Disease | Gene Affected |
|---|---|
| Epidermolysis Bullosa Dystrophica Dominant | COL7A1 |
| Epidermolysis Bullosa Dystrophica Recessive | COL7A1 |
| (Hallopeau-Siemens) | |
| Epidermolysis Bullosa Junctional | LAMB3 |
| Epidermolysis Bullosa Simplex | KRT5; KRT14 |
| Epidermolytic Ichthyosis | KRT1; KRT10 |
| Hailey-Hailey Disease | ATP2C1 |
| Lamellar Ichthyosis/Nonbullous Congenital | TGM1 |
| Ichthyosiform Erythroderma (ARCI) | |
| Netherton Syndrome | SPINK5 |

TABLE 22
Exemplary protective mutations that reduce disease risk.

| Disease | Gene | Exemplary Protective Mutation |
|---|---|---|
| Alzheimer's | APP | A673T |
| Parkinson's | SGK1 | |
| Diabetes | SLC30A8 | p.Arg138X; p.Lys34SerfsX50 |
| (Type II) | | |
| Cardiovascular | PCSK9 | R46L |
| Disease | | |
| Cardiovascular | ASGR1 | NM_001671.4, |
| Disease | | c.284-36_283+33delCTGGGGCTGGGG; |
| | | (SEQ ID NO: 1622) |
| | | NP_001662.1, p.W158X |
| Cardiovascular | NPC1L1 | p.Arg406X |
| Disease | | |
| Cardiovascular | APOC3 | R19X; IVS2+1G→A; A43T |
| Disease | | |
| Cardiovascular | LPA | |
| Disease | | |
| Cardiovascular | ANGPTL4 | E40K |
| Disease | | |
| Cardiovascular | ANGPTL3 | p.Ser17Ter; p.Asn121fs; |
| Disease | | p.Asn147fs; c.495+6T→C |
| HIV infection | CCR5 | CCR5-delta32 |

### Pathogenic Mutations

[0590] In some embodiments, the systems or methods provided herein can be used to correct a pathogenic mutation. The pathogenic mutation can be a genetic mutation that increases an individual's susceptibility or predisposition to a certain disease or disorder. In some embodiments, the pathogenic mutation is a disease-causing mutation in a gene associated with a disease or disorder. In some embodiments, the systems or methods provided herein can be used to revert the pathogenic mutation to its wild-type counterpart. In some embodiments, the system-s or methods provided herein can be used to change the pathogenic mutation to a sequence not causing the disease or disorder.

[0591] Table 23 provides exemplary indications (column 1), underlying genes (column 2), and pathogenic mutations that can be corrected using the systems or methods described herein (column 3).

TABLE 23
Indications, genes, and causitive pathogenic mutations.

| | | Pathogenic |
|---|---|---|
| Disease | Gene | Mutation^{#} |
| Achromatopsia | CNGB3 | 1148delC |
| Alpha-1 Antitrypsin Deficiency | SERPINAI | E342K |
| Alpha-1 Antitrypsin Deficiency | SERPINAI | E342K |
| Alpha-1 Antitrypsin Deficiency | SERPINAI | R48C (R79C) |
| Amaurosis Congenita (LCA10) | CEP290 | 2991+1655A>G |
| Andersen-Tawil syndrome | KCNJ2 | R218W |
| Arrhythmogenic right ventricular | PKP2 | c.235C>T |
| cardiomyopathy (ARVC) | | |
| associated with congenital | F11 | E117* |
| factor XI deficiency | | |
| associated with congenital | F11 | F283L |
| factor XI deficiency | | |
| ATTR amyloidosis | TTR | V50M/N30M |
| autosomal dominant deafness | COCH | G88E |
| autosomal dominant deafness | TECTA | Y1870C |
| autosomal dominant | SNCA | A53T |
| Parkinson's disease | | |
| autosomal dominant | SNCA | A30P |
| Parkinson's disease | | |
| Autosomal dominant rickets | FGF23 | R176Q |
| autosomal recessive deafness | CX30 | T5M |
| autosomal recessive deafness | DFNB59 | R183W |
| autosomal recessive deafness | TMC1 | Y182C |
| autosomal recessive | ARH | Q136* |
| hypercholesterolemia | | |
| Blackfan-Diamond anemia | RPS19 | R62Q |
| blue-cone monochromatism | OPN1LW | C203R |
| Brugada syndrome | SCN5A | E1784K |
| CADASIL syndrome | NOTCH3 | R90C |
| | gene | |
| CADASIL syndrome | NOTCH3 | R141C |
| | gene | |
| Canavan disease | ASPA | E285A |
| Canavan disease | ASPA | Y231X |
| Canavan disease | ASPA | A305E |
| carnitine palmitoyltransferase | CPT2 | S113L |
| II deficiency | | |
| choroideremia | CHM | R293* |
| choroideremia | CHM | R270* |
| choroideremia | CHM | A117A |
| Citrullinemia Type I | ASS | G390R |
| classic galactosemia | GALT | Q188R |
| classic homocysteinaria | CBS | T191M |
| classic homocysteinuria | CBS | G307S |
| CLN2 Disease | TPP1 | c.509-1G>C |
| CLN2 Disease | TPP1 | c.622C>T |
| CLN2 Disease | TPP1 | c.851G>T |
| cone-rod dystrophy | GUCY2D | R838C |
| congenital factor V deficiency | F5 | R506Q |
| congenital factor V deficiency | F5 | R534Q |
| congenital factor VII deficiency | F7 | A294V |
| congenital factor VII deficiency | F7 | C310F |
| congenital factor VII deficiency | F7 | R304Q |
| congenital factor VII deficiency | F7 | QI00R |
| Creutzfeldt-Jakob disease (CJD) | PRNP | E200K |
| Creutzfeldt-Jakob disease (CJD) | PRNP | M129V |
| Creutzfeldt Jakob disease (CJD) | PRNP | P102L |
| Creutzfeldt-Jakob disease (CJD) | PRNP | D178N |
| cystic fibrosis | CFTR | G551D |
| cystic fibrosis | CFTR | W1282* |
| cystic fibrosis | CFTR | R553* |
| cystic fibrosis | CFTR | R117H |
| cystic fibrosis | CFTR | delta F508 |
| cystinosis | CTNS | W138* |
| Darier disease | ATP2A2 | N767S |
| Darier disease | ATP2A2 | N767S |
| Darier disease | ATP2A2 | N767S |
| Epidermolysis Bullosa Junctional | LAMB3 | R42X |
| Epidermolysis Bullosa Junctional | LAMB3 | R635X |
| familial amyotrophic | SOD1 | A4V |
| lateral sclerosis (ALS) | | |
| familial amyotrophic | SOD1 | H46R |
| lateral sclerosis (ALS) | | |
| familial amyotrophic | SOD1 | G37R |
| lateral sclerosis (ALS) | | |
| Gaucher disease | GBA | N370S |
| Gaucher disease | GBA | N370S |
| Gaucher disease | GBA | L444P |
| Gaucher disease | GBA | L444P |
| Gaucher disease | GBA | L483P |
| glutaryl-CoA dehydrogenase | GCDH | R138G |
| deficiency | | |
| glutaryl-CoA dehydrogenase | GCDH | M263V |
| deficiency | | |
| glutaryl-CoA dehydrogenase | GCDH | R402W |
| deficiency | | |
| glycine encephalopathy | GLDC | A389V |
| glycine encephalopathy | GLDC | G771R |
| glycine encephalopathy | GLDC | T269M |
| hemophilia A | F8 | R2178C |
| hemophilia A | F8 | R550C |
| hemophilia A | F8 | R2169H |
| hemophilia A | F8 | R1985Q |
| hemophilia B | F9 | T342M |
| hemophilia B | F9 | R294Q |
| hemophilia B | F9 | R43Q |
| hemophilia B | F9 | R191H |
| hemophilia B | F9 | G106S |
| hemophilia B | F9 | A279T |
| hemophilia B | F9 | R75* |
| hemophilia B | F9 | R294* |
| hemophilia B | F9 | R379Q |
| Hereditary antithrombin | SERPINCI | R48C (R79C) |
| deficiency type I | | |
| hereditary chronic pancreatitis | PRSS1 | R122H |
| Hunter syndrome | IDS | R88C |
| Hunter syndrome | IDS | G374G |
| Hurler syndrome (MPS1) | IDUA | Q70* |
| Hurler syndrome (MPS1) | IDUA | W402* |
| Hyperkalemic periodic paralysis | SCN4A | T704M |
| Hyperkalemic periodic paralysis | SCN4A | M1592V |
| Hyperkalemic periodic paralysis | CACNA1S | p.Arg528X |
| Hyperkalemic periodic paralysis | CACNA1S | p.Arg1239 |
| intermittent porphyria | HMBS | Rl73W |
| isolated agammaglobulinemia | E47 | E555K |
| Lattice corneal dystrophy type I | TGFBI | Arg124Cys |
| LCHAD deficiency | HADHA | Glu474Gln |
| Leber congenital amaurosis 2 | RPE65 | R44* |
| Leber congenital amaurosis 2 | RPE65 | IVS1 |
| Leber congenital amaurosis 2 | RPE65 | G-A, +5 |
| Lesch-Nyhan syndrome | HPRTI | R51* |
| Lesch-Nyhan syndrome | HPRTI | R170* |
| Limb-girdle muscular | SGCA | Arg77Cys |
| dystrophy, type 2D | | |
| Marteauz-Lamy Syndrome (MSPVI) | ARSB | Y210C |
| Mediterranean G6PD deficiency | G6PD | S188D |
| medium-chain acyl-CoA | ACADM | K329E |
| dehydrogenase deficiency | | |
| medium-chain acyl-CoA | ACADM | K329E |
| dehydrogenase deficiency | | |
| medium-chain acyl-CoA | ACADM | K329E |
| dehydrogenase deficiency | | |
| Meesmann epithelial corneal | KRT12 | L132P |
| dystrophy | | |
| metachromatic leukodystrophy | ARSA | P426L |
| metachromatic leukodystrophy | ARSA | c.459+1G>A |
| Morquio Syndrome (MPSIVA) | GALNS | R386C |
| Mucolipidosis IV | MCOLN1 | 406-2A>G |
| Mucolipidosis IV | MCOLN1 | 511_6943del |
| Neimann-Pick disease type A | SMPDI | L302P |
| Neuronal ceroid lipofuscinosis | CLN2 | R208* |
| (NCL) | | |
| neuronal ceroid lipofuscinosis 1 | PPT1 | R151* |
| Parkinson's disease | LRRK2 | G2019S |
| Pendred syndrome | PDS | T461P |
| Pendred syndrome | PDS | L236P |
| Pendred syndrome | PDS | c.1001+1G>A |
| Pendred syndrome | PDS | IVS8, +1G>A, |
| phenylketonuria | PAH | R408W |
| phenylketonuria | PAH | I65T |
| phenylketonuria | PAH | R261Q |
| phenylketonuria | PAH | IVS10-11G>A |
| phenylketonuria | PCDH15 | R245* |
| phenylketonuria | PCDH15 | R245* |
| Pompe disease | GAA | c.-32-13T>G |
| Primary ciliary dyskinesia | DNAI1 | IVS1+2_3insT |
| Primary ciliary dyskinesia | DNAH5 | 10815delT |
| primary hypoxaluria | AGXT | G170R |
| Progressive familial intrahepatic | ABCB11 | D482G |
| cholestasis type 2 | | (c.1445A>G) |
| Progressive familial intrahepatic | ABCB11 | E297G |
| cholestasis type 2 | | |
| Propionic acidemia | PCCB; | c.1218_1231- |
| | PCCA | del14ins12 |
| pseudoxanthoma elasticum | ABCC6 | R1141* |
| Pyruvate kinase deficiency (PKD) | PKLR | c.1456c->T |
| retinitis pigmentos | USH2a | C759F |
| retinitis pigmentosa | IMPDHI | D226N |
| retinitis pigmentosa | PDE6A | V685M |
| retinitis pigmentosa | PDE6A | D670G |
| retinitis pigmentosa | PRPF3 | T494M |
| retinitis pigmentosa | PRPF8 | H2309R |
| retinitis pigmentosa | RHO | P23H |
| retinitis pigmentosa | RHO | P347L |
| retinitis pigmentosa | RHO | P347L |
| retinitis pigmentosa | RHO | D190N |
| retinitis pigmentosa | RPI | R667* |
| retinitis pigmentosa/ | USH1C | V72V |
| Usher syndrome type 1C | | |
| Rett syndrome | MECP2 | R106W |
| Rett syndrome | MECP2 | R133C |
| Rett syndrome | MECP2 | R306C |
| Rett syndrome | MECP2 | R168* |
| Rett syndrome | MECP2 | R255* |
| Sanfilippo syndrome A (MPSIIIA) | SGSH | R74C |
| Sanfilippo syndrome A (MPSIIIA) | SGSH | R245H |
| Sanfilippo syndrome B (MPSIIIB) | NAGLU | R297* |
| Sanfilippo syndrome B (MPSIIIB) | NAGLU | Y140C |
| severe combined immunodeficiency | ADA | G216R |
| severe combined immunodeficiency | ADA | G216R |
| severe combined immunodeficiency | ADA | Q3* |
| sickle cell disease | HBB | E6V |
| sickle cell disease | HBB | E6V |
| sickle cell disease | HBB | E6V |
| sickle cell disease | HBB | E26K |
| sickle cell disease | HBB | E26K |
| sickle cell disease | HBB | E7K |
| sickle cell disease | HBB | c.-138C>T |
| sickle cell disease | HBB | IVS2 |
| sickle cell disease | HBB | 654C>T |
| Sly Syndrome (MPSVII) | GUSB | L175F |
| Stargardt disease | ABCA4 | A1038V |
| Stargardt disease | ABCA4 | A1038V |
| Stargardt disease | ABCA4 | L541P |
| Stargardt disease | ABCA4 | G1961E |
| Stargardt disease | ABCA4 | G1961E |
| Stargardt disease | ABCA4 | G1961E |
| Stargardt disease | ABCA4 | G1961E |
| Stargardt disease | ABCA4 | c.2588G>C |
| Stargardt disease | ABCA4 | c.5461-10T>C |
| Stargardt disease | ABCA4 | c.5714+5G>A |
| Tay Sachs | HEXA | InsTATC1278 |
| tyrosinemia type 1 | FAH | P261L |
| Usher syndrome type 1F | PCDH15 | R245* |
| variegate porphyria | PPOX | R59W |
| VCP myopathy (IBMPFD) 1 | VCP | R1555X |
| von Gierke disease | G6PC | Q347* |
| von Gierke disease | G6PC | Q347* |
| von Gierke disease | G6PC | Q347* |
| von Gierke disease | G6PC | R83C |
| Wilson's Disease | ATP7B | E297G |
| X-linked myotubular myopathy | MTMI | c.1261-10A>G |
| X-linked retinoschisis | RS1 | R102W |
| X-linked retinoschisis | RS1 | R141C |

^{#}See J T den Dunnen and S E Antonarakis, Hum Mutat. 2000; 15(1):7-12, herein incorporated by reference in its entirety, for details of the nomenclatures of gene mutations.
*means a stop codon.

### Compensatory Edits

[0592] In some embodiments, the systems or methods provided herein can be used to introduce a compensatory edit. In some embodiments, the compensatory edit is at a position of a gene associated with a disease or disorder, which is different from the position of a disease-causing mutation. In some embodiments, the compensatory mutation is not in the gene containing the causitive mutation. In some embodiments, the compensatory edit can negate or compensate for a disease-causing mutation. In some embodiments, the compensatory edit can be introduced by the systems or methods provided herein to suppress or reverse the mutant effect of a disease-causing mutation.

[0593] Table 24 provides exemplary indications (column 1), genes (column 2), and compensatory edits that can be introduced using the systems or Methods described herein (column 3). In some embodiments, the compensatory edits provided in Table 24 can be introduced to suppress or reverse the mutant effect of a disease-causing mutation.

TABLE 24
Indications, genes, compensatory edits, and exemplary design features.

| Disease | Gene | Nucleotide Change^{#} |
|---|---|---|
| Alpha-1 Antitrypsin Deficiency | SERPINAI | F51L |
| Alpha-1 Antitrypsin Deficiency | SERPINAI | M374I |
| Alpha-1 Antitrypsin Deficiency | SERPINAI | A348V/A347V |
| Alpha-1 Antitrypsin Deficiency | SERPINAI | K387R |
| Alpha-1 Antitrypsin Deficiency | SERPINAI | T59A |
| Alpha-1 Antitrypsin Deficiency | SERPINAI | T68A |
| ATTR amyloidosis | TTR | Al08V |
| ATTR amyloidosis | TTR | Rl04H |
| ATTR amyloidosis | TTR | T119M |
| Cystic fibrosis | CFTR | R555K |
| Cystic fibrosis | CFTR | F409L |
| Cystic fibrosis | CFTR | F433L |
| Cystic fibrosis | CFTR | H667R |
| Cystic fibrosis | CFTR | Rl070W |
| Cystic fibrosis | CFTR | R29K |
| Cystic fibrosis | CFTR | R553Q |
| Cystic fibrosis | CFTR | 1539T |
| Cystic fibrosis | CFTR | G550E |
| Cystic fibrosis | CFTR | F429S |
| Cystic fibrosis | CFTR | Q637R |
| Sickle cell disease | HBB | A70T |
| Sickle cell disease | HBB | A70V |
| Sickle cell disease | HBB | L88P |
| Sickle cell disease | HBB | F85L and/or F85P |
| Sickle cell disease | HBB | E22G |
| Sickle cell disease | HBB | G16D and/or G16N |

^{#}See J T den Dunnen and S E Antonarakis, Hum Mutat. 2000; 15(1):7-12, herein incorporated by reference in its entirety, for details of the nomenclatures of gene mutations.

### Regulatory Edits

[0594] In some embodiments, the systems or methods provided herein can be used to introduce a regulatory edit. In some embodiments, the regulatory edit is introduced to a regulatory sequence of a gene, for example, a gene promoter, gene enhancer, gene repressor, or a sequence that regulates gene splicing. In some embodiments, the regulatory edit increases or decreases the expression level of a target gene. In some embodiments, the target gene is the same as the gene containing a disease-causing mutation. In some embodiment, the target gene is different from the gene containing a disease-causing mutation. For example, the systems or methods provided herein can be used to upregulate the expression of fetal hemoglobin by introducing a regulatory edit at the promoter of bcl11a, thereby treating sickle cell disease.

[0595] Table 25 provides exemplary indications (column 1), genes (column 2), and regulatory edits that can be introduced using the systems or methods described herein (column 3).

TABLE 25
Indications, genes, and compensatory regulatory edits.

| Disease | Gene | Nucleotide Change^{#} |
|---|---|---|
| homozygous familial | LDLR | c.81C>T |
| hypercholesterolaemia | | |
| Porphyrias | ALAS1 | c.3G>A |
| Porphyrias | ALAS1 | c.2T>C |
| Porphyrias | ALAS1 | c.46C>T |
| Porphyrias | ALAS1 | c.91C>T |
| Porphyrias | ALAS1 | c.91C>T |
| Porphyrias | ALAS1 | c.226C>T |
| Porphyrias | ALAS1 | c.226C>T |
| Porphyrias | ALAS1 | c.226C>T |
| Porphyrias | ALAS1 | c.229C>T |
| Porphyrias | ALAS1 | c.247C>T |
| Porphyrias | ALAS1 | c.247C>T |
| Porphyrias | ALAS1 | c.250C>T |
| Porphyrias | ALAS1 | c.250C>T |
| Porphyrias | ALAS1 | c.340C>T |
| Porphyrias | ALAS1 | c.340C>T |
| Porphyrias | ALAS1 | c.349C>T |
| Porphyrias | ALAS1 | c.391C>T |
| Porphyrias | ALAS1 | c.391C>T |
| Porphyrias | ALAS1 | c.403C>T |
| Porphyrias | ALAS1 | c.403C>T |
| Porphyrias | ALAS1 | c.199+1G>A |
| Porphyrias | ALAS1 | c.199+1G>A |
| Porphyrias | ALAS1 | c.199+1G>A |
| Porphyrias | ALAS1 | c.199+1G>A |
| Porphyrias | ALAS1 | c.199+2T>C |
| Porphyrias | ALAS1 | c.199+2T>C |
| Porphyrias | ALAS1 | c.199+2T>C |
| Porphyrias | ALAS1 | c.199+2T>C |
| Porphyrias | ALAS1 | c.200-2A>G |
| Porphyrias | ALAS1 | c.427+1G>A |
| Porphyrias | ALAS1 | c.427+2T>C |
| Porphyrias | ALAS1 | c.1165+1G>A |
| Porphyrias | ALAS1 | c.1165+2T>C |
| Porphyrias | ALAS1 | c.1166-1A>G |
| Porphyrias | ALAS1 | c.1331-2A>G |
| sickle cell disease | BCL11A | c.386-24278G>A |
| sickle cell disease | BCL11A | c.386-24983T>C |
| sickle cell disease | HBG1 | c.-167C>T |
| sickle cell disease | HBG1 | c.-170G>A |
| sickle cell disease | HBG1 | c.-249C>T |
| sickle cell disease | HBG2 | c.-211C>T |
| sickle cell disease | HBG2 | c.-228T>C |
| sickle cell disease | HBG1/2 | C.-198T>C |
| sickle cell disease | HBG1/2 | C.-198T>C |
| sickle cell disease | HBG1/2 | C.-198T>C |
| sickle cell disease | HBG1/2 | C.-198T>C |
| sickle cell disease | HBG1/2 | C.-198T>C |
| sickle cell disease | HBG1/2 | C.-198T>C |
| sickle cell disease | HBG1/2 | C.-198T>C |
| sickle cell disease | HBG1/2 | C.-175T>C |
| sickle cell disease | HBG1/2 | C.-175T>C |
| sickle cell disease | HBG1/2 | C.-175T>C |
| sickle cell disease | HBG1/2 | C.-175T>C |
| sickle cell disease | HBG1/2 | C.-175T>C |
| sickle cell disease | HBG1/2 | C.-114~-102 deletion |
| sickle cell disease | HBG1/2 | C.-114~-102 deletion |
| sickle cell disease | HBG1/2 | C.-114~-102 deletion |
| sickle cell disease | HBG1/2 | C.-114~-102 deletion |
| sickle cell disease | HBG1/2 | C.-114~-102 deletion |
| sickle cell disease | HBG1/2 | C.-114~-102 deletion |
| sickle cell disease | HBG1/2 | C.-114~-102 deletion |
| sickle cell disease | HBG1/2 | C.-114~-102 deletion |
| sickle cell disease | HBG1/2 | C.-114~-102 deletion |
| sickle cell disease | HBG1/2 | C.-114~-102 deletion |
| sickle cell disease | HBG1/2 | C.-114~-102 deletion |
| sickle cell disease | HBG1/2 | c.-90 BCLllA Binding |
| sickle cell disease | HBG1/2 | c.-90 BCLllA Binding |
| sickle cell disease | HBG1/2 | C.-202C>T, -201C>T, -198T>C, |
| | | -197C>T, -196C>T, -195C>G |
| sickle cell disease | HBG1/2 | C.-197C>T, -196C>T, -195C>G |

^{#}See J T den Dunnen and S E Antonarakis, Hum Mutat. 2000; 15(1):7-12, herein incorporated by reference in its entirety, for details of the nomenclatures of gene mutations.

### Repeat Expansion Diseases

[0596] In some embodiments, the systems or methods provided herein can be used to a repeat expansion disease, for example, a repeat expansion disease provided in Table 26. Table 26 provides the indication (column 1), the gene (column 2), minimal repeat sequence of the repeat that is expanded in the condition (column 3), and the location of the repeat relative to the listed gene for each indication (column 4). In some embodiments, the systems or methods provided herein, for example, those comprising Gene Writers, can be used to treat repeat expansion diseases by resetting the number of repeats at the locus according to a customized RNA template (see, e.g., Example 24).

TABLE 26
Exemplary repeat expansion diseases, genes,
causal repeats, and repeat locations.

| | | Causal | Repeat |
|---|---|---|---|
| Disease | Gene | repeat | location |
| myotonic dystrophy 1 | DMPK/ | CTG | 3′ UTR |
| | DM1 | | |
| myotonic dystrophy 2 | ZNF9/ | CCTG | Intron 1 |
| | CNBP | | |
| dentatorubral- | ATN1 | CAG | Coding |
| pallidoluysian | | | |
| atrophy | | | |
| fragile X mental | FMR1 | CGG | 5′ UTR |
| retardation syndrome | | | |
| fragile X E mental | FMR2 | GCC | 5′ UTR |
| retardation | | | |
| Friedreich's ataxia | FXN | GAA | Intron |
| fragile X tremor | FMR1 | CGG | 5′ UTR |
| ataxia syndrome | | | |
| Huntington's disease | HTT | CAG | Coding |
| Huntington's disease- | JPH3 | CTG | 3′ UTR, |
| like 2 | | | coding |
| myoclonic epilepsy | CSTB | CCCCGC | Promoter |
| of Unverricht and | | CCCGCG | |
| Lundborg | | (SEQ | |
| | | ID NO: | |
| | | 1623) | |
| oculopharyngeal | PABPN1 | GCG | Coding |
| muscular dystrophy | | | |
| spinal and bulbar | AR | CAG | Coding |
| muscular atrophy | | | |
| spinocerebellar | ATXN1 | CAG | Coding |
| ataxia 1 | | | |
| spinocerebellar | ATXN2 | CAG | Coding |
| ataxia 2 | | | |
| spinocerebellar | ATXN3 | CAG | Coding |
| ataxia 3 | | | |
| spinocerebellar | CACNA1A | CAG | Coding |
| ataxia 6 | | | |
| spinocerebellar | ATXN7 | CAG | Coding |
| ataxia 7 | | | |
| spinocerebellar | ATXN8 | CTG/ | CTG/CAG |
| ataxia 8 | | CAG | (ATXN8) |
| spinocerebellar | ATXN10 | ATTCT | Intron |
| ataxia 10 | | | |
| spinocerebellar | PPP2R2B | CAG | Promoter, |
| ataxia 12 | | | 5′ UTR? |
| spinocerebellar | TBP | CAG | Coding |
| ataxia 17 | | | |
| Syndromic/ | ARX | GCG | Coding |
| non-syndromic | | | |
| X-linked mental | | | |
| retardation | | | |

### Exemplary Templates

[0597] In some embodiments, the systems or methods provided herein use the template sequences listed in Table 27. Table 27 provides exemplary template RNA sequences (column 5) and optional second-nick gRNA sequences (column 6) designed to be paired with a Gene Writing polypeptide to correct the indicated pathogenic mutations (column 4). All the templates in Table 27 are meant to exemplify the total sequence of: (1) targeting gRNA for first strand nick, (2) polypeptide binding domain, (3) heterologous object sequence, and (4) target homology domain for setting up TPRT at first strand nick.

TABLE 27
Exemplary diseases, tissues, genes, pathogenic mutations,
template RNA sequences, and second nick gRNA sequences.

| | | | | | Second |
|---|---|---|---|---|---|
| | | | | | nick |
| Disease | Tissue | Gene | Mutation | Template RNA | gRNA |
| Alpha-1 | Liver | SERPINA1 | PiZ | TCCCCTCCAGGCCGTGCATAGTTTT | TTTGTT |
| antitrypsin | | | | AGAGCTAGAAATAGCAAGTTAAAAT | GAACTT |
| | | | | AAGGCTAGTCCGTTATCAACTTGAA | GACCTC |
| | | | | AAAGTGGGACCGAGTCGGTCCTcGT | GG (SEQ |
| | | | | CGATGGTCAGCACAGCCTTATGCAC | ID NO: |
| | | | | GGCCTGGA (SEQ ID NO: 1624) | 1625) |
| Cystic | Lung | CFTR | deltaF508 | ACCATTAAAGAAAATATCATGTTTT | AaagAT |
| fibrosis | | | | AGAGCTAGAAATAGCAAGTTAAAAT | GATATT |
| | | | | AAGGCTAGTCCGTTATCAACTTGAA | TTCTTT |
| | | | | AAAGTGGGACCGAGTCGGTCCACCA | AA (SEQ |
| | | | | aagATGATATTTTCTTTA (SEQ | ID NO: |
| | | | | ID NO: 1626) | 1627) |
| Sickle cell | HSC | HBB | HbS | GTAACGGCAGACTTCTCCACGTTTT | TGGTGA |
| | | | | AGAGCTAGAAATAGCAAGTTAAAAT | GGCCCT |
| | | | | AAGGCTAGTCCGTTATCAACTTGAA | GGGCAG |
| | | | | AAAGTGGGACCGAGTCGGTCCGACT | GT |
| | | | | CCTGaGGAGAAGTCTGCC (SEQ | (SEQ ID |
| | | | | ID NO: 1628) | NO: |
| | | | | | 1629) |
| Wilson's | Liver | ATP7B | H1069Q | TTGGTGACTGCCACGCCCAAGTTTT | GGCCAG |
| Disease | | | | AGAGCTAGAAATAGCAAGTTAAAAT | CAGTGA |
| | | | | AAGGCTAGTCCGTTATCAACTTGAA | ACAcCC |
| | | | | AAAGTGGGACCGAGTCGGTCCACAc | CT |
| | | | | CCCTTGGGCGTGGCAGTC (SEQ | (SEQ ID |
| | | | | ID NO: 1630) | NO: |
| | | | | | 1631) |
| ARVC | Heart | PKP2 | 235C>T | ACTCAGGAACACTGCTGGTTGTTTT | TTGGTT |
| | | | | AGAGCTAGAAATAGCAAGTTAAAAT | GAAAAT |
| | | | | AAGGCTAGTCCGTTATCAACTTGAA | GATTTT |
| | | | | AAAGTGGGACCGAGTCGGTCCTTCA | GT |
| | | | | CtGAACCAGCAGTGTTCC (SEQ | (SEQ ID |
| | | | | ID NO: 1632) | NO: |
| | | | | | 1633) |
| Long QT | Heart | KCNQ1 | P343S | CCAGGGAAAACGCACCCACGGTTTT | CTCCTT |
| syndrome 1 | | | | AGAGCTAGAAATAGCAAGTTAAAAT | CTTTGC |
| | | | | AAGGCTAGTCCGTTATCAACTTGAA | GCTCcC |
| | | | | AAAGTGGGACCGAGTCGGTCCTCcC | AG (SEQ |
| | | | | AGCGGTAGGTGCCCCGTGGGTGCGT | ID NO: |
| | | | | TTTC (SEQ ID NO: 1634) | 1635) |
| Mucolipidosis | CNS | MCOLN1 | 406-2A>G | GCCCTCCCCTTCTCTGCCCAGTTTT | TCAGGC |
| IV | | | | AGAGCTAGAAATAGCAAGTTAAAAT | AACGCC |
| | | | | AAGGCTAGTCCGTTATCAACTTGAA | AGGTAC |
| | | | | AAAGTGGGACCGAGTCGGTCCGGTA | tG |
| | | | | CtGTGGGCAGAGAAGGGG (SEQ | (SEQ ID |
| | | | | ID NO: 1636) | NO: |
| | | | | | 1637) |

[0598] In some embodiments, the systems or methods provided herein use the template sequences listed in Table 35. Table 35 provides exemplary template RNA sequences (column 5) and optional second-nick gRNA sequences (column 6) designed to be paired with a Gene Writing polypeptide to correct the indicated pathogenic mutations (column 4). All the templates in Table 35 are meant to exemplify the total sequence of: (1) targeting gRNA for first strand nick, (2) polypeptide binding domain, (3) heterologous object sequence, and (4) target homology domain for setting up TPRT at first strand nick.

TABLE 35
Exemplary Gene Writing templates and second nick gRNA
sequences for the correction of exemplary repeat
expansion diseases. The region of the template
spanning the repeat(s) is indicated in lowercase.

| | | | | | | Second- |
|---|---|---|---|---|---|---|
| | | Reference | | | Template | nick |
| Disease | Gene | Accession | Repeat | Location | RNA | gRNA |
| myotonic | DMPK | NC_000019.10 | CTG | 3′ UTR | CTCGAAGGGTC | ATCA |
| dystrophy | | (45769709 . . . | | | CTTGTAGCCGT | CAGG |
| 1 | | 45782490, | | | TTTAGAGCTAG | ACTG |
| | | complement) | | | AAATAGCAAGT | GAGC |
| | | | | | TAAAATAAGGC | TGGG |
| | | | | | TAGTCCGTTAT | (SEQ |
| | | | | | CAACTTGAAAA | ID NO: |
| | | | | | AGTGGGACCGA | 1639) |
| | | | | | GTCGGTCCGTG | |
| | | | | | ATCCCCCcagc | |
| | | | | | agcagcagcag | |
| | | | | | cagcagcagca | |
| | | | | | gcagcagcagc | |
| | | | | | agcagcagcag | |
| | | | | | cagcagcagca | |
| | | | | | gCATTCCCGGC | |
| | | | | | TACAAGGACCC | |
| | | | | | T (SEQ ID | |
| | | | | | NO: 1638) | |
| myotonic | CNBP | NC_000003.12 | CCTG | Intron 1 | ACCACTGCACT | GCCT |
| dystrophy | | (129167827 . . . | | | CCAGCCTAGGT | CAGC |
| 2 | | 129183896, | | | TTTAGAGCTAG | CTCC |
| | | complement) | | | AAATAGCAAGT | TGAG |
| | | | | | TAAAATAAGGC | TAGC |
| | | | | | TAGTCCGTTAT | (SEQ |
| | | | | | CAACTTGAAAA | ID NO: |
| | | | | | AGTGGGACCGA | 1641) |
| | | | | | GTCGGTCCGTG | |
| | | | | | TCTGTCTGTCT | |
| | | | | | GTCTGTCTGTC | |
| | | | | | TGTCTGTCTGT | |
| | | | | | CTGTCTGcctg | |
| | | | | | cctgcctgcct | |
| | | | | | gcctgcctgcc | |
| | | | | | tgcctggctgc | |
| | | | | | ctgtctgcctg | |
| | | | | | tctgcctgcct | |
| | | | | | gcctgcctgcc | |
| | | | | | tgcctgcctgT | |
| | | | | | CTGTCTCACTT | |
| | | | | | TGTCCCCTAGG | |
| | | | | | CTGGAGTGCA | |
| | | | | | (SEQ ID NO: | |
| | | | | | 1640) | |
| fragile X | FMR1 | NC_000023.11 | CGG | 5′ UTR | GGGGGCGTGCG | GCTC |
| mental | | (147911919 . . . | | | GCAGCGCGGGT | AGAG |
| retardation | | 147951127) | | | TTTAGAGCTAG | GCGG |
| syndrome | | | | | AAATAGCAAGT | CCCT |
| | | | | | TAAAATAAGGC | CCAC |
| | | | | | TAGTCCGTTAT | (SEQ |
| | | | | | CAACTTGAAAA | ID NO: |
| | | | | | AGTGGGACCGA | 1643) |
| | | | | | GTCGGTCCTGC | |
| | | | | | GGGCGCTCGAG | |
| | | | | | GCCCAGccgcc | |
| | | | | | gccgccgccgc | |
| | | | | | cgccgccgccg | |
| | | | | | cctccgccgcc | |
| | | | | | gccgccgccgc | |
| | | | | | cgccgccgccg | |
| | | | | | CGCTGCCGCAC | |
| | | | | | G (SEQ ID | |
| | | | | | NO: 1642) | |
| Friedreich's | FXN | NC_000009.12 | GAA | Intron | CAGGCGCGCGA | CGCT |
| ataxia | | (69035752 . . . | | | CACCACGCCGT | TGAG |
| | | 69079076) | | | TTTAGAGCTAG | CCCG |
| | | | | | AAATAGCAAGT | GGAG |
| | | | | | TAAAATAAGGC | GCAG |
| | | | | | TAGTCCGTTAT | (SEQ |
| | | | | | CAACTTGAAAA | ID NO: |
| | | | | | AGTGGGACCGA | 1645) |
| | | | | | GTCGGTCCAAC | |
| | | | | | CCAGTATCTAC | |
| | | | | | TAAAAAATACA | |
| | | | | | AAAAAAAAAAA | |
| | | | | | AAAAgaagaag | |
| | | | | | aagaagaagaa | |
| | | | | | AATAAAGAAAA | |
| | | | | | GTTAGCCGGGC | |
| | | | | | GTGGTGTCGCG | |
| | | | | | C (SEQ ID | |
| | | | | | NO: 1644) | |
| Huntington | HTT | NC_000004.12 | CAG | Coding | GGCGGCTGAGG | CGCT |
| disease | | (3074681 . . . | | | AAGCTGAGGGT | GCAC |
| | | 3243960) | | | TTTAGAGCTAG | CGAC |
| | | | | | AAATAGCAAGT | CGTG |
| | | | | | TAAAATAAGGC | AGTT |
| | | | | | TAGTCCGTTAT | (SEQ |
| | | | | | CAACTTGAAAA | ID NO: |
| | | | | | AGTGGGACCGA | 1647) |
| | | | | | GTCGGTCCAGT | |
| | | | | | CCCTCAAGTCC | |
| | | | | | TTCcagcagca | |
| | | | | | gcagcagcagc | |
| | | | | | agcagcagcag | |
| | | | | | cagcagcagca | |
| | | | | | gcagcagcagc | |
| | | | | | agcagcaacag | |
| | | | | | ccgccaccgcc | |
| | | | | | gccgccgccgc | |
| | | | | | cgccgcctcct | |
| | | | | | CAGCTTCCTCA | |
| | | | | | G (SEQ ID | |
| | | | | | NO: 1646) | |
| spinocereb | ATXN1 | NC_000006.12 | CAG | Coding | TGAGCCCCGGA | TCCA |
| ellar ataxia | | (16299112 . . . | | | GCCCTGCTGGT | GTTC |
| 1 | | 16761490, | | | TTTAGAGCTAG | TCCG |
| | | complement) | | | AAATAGCAAGT | CAGA |
| | | | | | TAAAATAAGGC | ACAC |
| | | | | | TAGTCCGTTAT | (SEQ |
| | | | | | CAACTTGAAAA | ID NO: |
| | | | | | AGTGGGACCGA | 1649) |
| | | | | | GTCGGTCCACA | |
| | | | | | AGGCTGAGcag | |
| | | | | | cagcagcagca | |
| | | | | | gcagcagcagc | |
| | | | | | agcagcagcag | |
| | | | | | catcagcatca | |
| | | | | | gcagcagcagc | |
| | | | | | agcagcagcag | |
| | | | | | cagcagcagca | |
| | | | | | gcagcagCACC | |
| | | | | | TCAGCAGGGCT | |
| | | | | | CCGGG (SEQ | |
| | | | | | ID NO: | |
| | | | | | 1648) | |

### Exemplary Heterologous Object Sequences

[0599] In some embodiments, the systems or methods provided herein comprise a heterologous object sequence, wherein the heterologous object sequence or a reverse complementary sequence thereof, encodes a protein (e.g., an antibody) or peptide. In some embodiments, the therapy is one approved by a regulatory agency such as FDA.

[0600] In some embodiments, the protein or peptide is a protein or peptide from the THPdb database (Usmani et al. PLoS One 12(7):e0181748 (2017), herein incorporated by reference in its entirety. In some embodiments, the protein or peptide is a protein or peptide disclosed in Table 28. In some embodiments, the systems or methods disclosed herein, for example, those comprising Gene Writers, may be used to integrate an expression cassette for a protein or peptide from Table 28 into a host cell to enable the expression of the protein or peptide in the host. In some embodiments, the sequences of the protein or peptide in the first column of Table 28 can be found in the patents or applications provided in the third column of Table 28, incorporated by reference in their entireties.

[0601] In some embodiments, the protein or peptide is an antibody disclosed in Table 1 of Lu et al. J Biomed Sci 27(1):1 (2020), herein incorporated by reference in its entirety. In some embodiments, the protein or peptide is an antibody disclosed in Table 29. In some embodiments, the systems or methods disclosed herein, for example, those comprising Gene Writers, may be used to integrate an expression cassette for an antibody from Table 29 into a host cell to enable the expression of the antibody in the host. In some embodiments, a system or method described herein is used to express an agent that binds a target of column 2 of Table 29 (e.g., a monoclonal antibody of column 1 of Table 29) in a subject having an indication of column 3 of Table 29.

TABLE 28
Exemplary protein and peptide therapeutics.

| Therapeutic peptide | Category | Patent Number |
|---|---|---|
| Lepirudin | Antithrombins and | CA1339104 |
| | Fibrinolytic Agents | |
| Cetuximab | Antineoplastic Agents | CA1340417 |
| Dor se alpha | Enzymes | CA2184581 |
| Denileukin diftitox | Antineoplastic Agents | |
| Etanercept | Immunosuppressive | CA2476934 |
| | Agents | |
| Bivalirudin | Antithrombins | U.S. Pat. No. 7,582,727 |
| Leuprolide | Antineoplastic Agents | |
| Peginterferon | Immunosuppressive | CA2203480 |
| alpha-2a | Agents | |
| Alteplase | Thrombolytic Agents | |
| Interferon alpha-n1 | Antiviral Agents | |
| Darbepoetin alpha | Anti-anemic Agents | CA2165694 |
| Reteplase | Fibrinolytic Agents | CA2107476 |
| Epoetin alpha | Hematinics | CA1339047 |
| Salmon Calcitonin | Bone Density | U.S. Pat. No. 6,440,392 |
| | Conservation Agents | |
| Interferon alpha-n3 | Immunosuppressive | |
| | Agents | |
| Pegfilgrastim | Immunosuppressive | CA1341537 |
| | Agents | |
| Sargramostim | Immunosuppressive | CA1341150 |
| | Agents | |
| Secretin | Diagnostic Agents | |
| Peginterferon | Immunosuppressive | CA1341567 |
| alpha-2b | Agents | |
| Asparagi se | Antineoplastic Agents | |
| Thyrotropin alpha | Diagnostic Agents | U.S. Pat. No. 5,840,566 |
| Antihemophilic | Coagulants and | CA2124690 |
| Factor | Thrombotic agents | |
| A kinra | Antirheumatic Agents | CA2141953 |
| Gramicidin D | Anti-Bacterial Agents | |
| Intravenous | Immunologic Factors | |
| Immunoglobulin | | |
| Anistreplase | Fibrinolytic Agents | |
| Insulin Regular | Antidiabetic Agents | |
| Tenecteplase | Fibrinolytic Agents | CA2129660 |
| Menotropins | Fertility Agents | |
| Interferon | Immunosuppressive | U.S. Pat. No. 6,936,695 |
| gamma-1b | Agents | |
| Interferon alpha-2a, | | CA2172664 |
| Recombi nt | | |
| Coagulation factor | Coagulants | |
| VIIa | | |
| Oprelvekin | Antineoplastic Agents | |
| Palifermin | Anti-Mucositis Agents | |
| Glucagon | Hypoglycemic Agents | |
| recombi nt | | |
| Aldesleukin | Antineoplastic Agents | |
| Botulinum Toxin | Antidystonic Agents | |
| Type B | | |
| Omalizumab | Anti-Allergic Agents | CA2113813 |
| Lutropin alpha | Fertility Agents | U.S. Pat. No. 5,767,251 |
| Insulin Lispro | Hypoglycemic Agents | U.S. Pat. No. 5,474,978 |
| Insulin Glargine | Hypoglycemic Agents | U.S. Pat. No. 7,476,652 |
| Collage se | | |
| Rasburicase | Gout Suppressants | CA2175971 |
| Adalimumab | Antirheumatic Agents | CA2243459 |
| Imiglucerase | Enzyme Replacement | U.S. Pat. No. 5,549,892 |
| | Agents | |
| Abciximab | Anticoagulants | CA1341357 |
| Alpha-l-protei se | Serine Protei se | |
| inhibitor | Inhibitors | |
| Pegaspargase | Antineoplastic Agents | |
| Interferon beta-1a | Antineoplastic Agents | CA1341604 |
| Pegademase bovine | Enzyme Replacement | |
| | Agents | |
| Human Serum | Serum substitutes | U.S. Pat. No. 6,723,303 |
| Albumin | | |
| Eptifibatide | Platelet Aggregation | U.S. Pat. No. 6,706,681 |
| | Inhibitors | |
| Serum albumin | Diagnostic Agents | |
| iodo ted | | |
| Infliximab | Antirheumatic Agents, | CA2106299 |
| | Anti-Inflammatory | |
| | Agents, Non- | |
| | Steroidal, Dermatologic | |
| | Agents, | |
| | Gastrointesti l Agents | |
| | and | |
| | Immunosuppressive | |
| | Agents | |
| Follitropin beta | Fertility Agents | U.S. Pat. No. 7,741,268 |
| Vasopressin | Antidiuretic Agents | |
| Interferon beta-1b | Adjuvants, Immunologic | CA1340861 |
| | and | |
| | Immunosuppressive | |
| | Agents | |
| Interferon | Antiviral Agents and | CA1341567 |
| alphacon-1 | Immunosuppressive | |
| | Agents | |
| Hyaluronidase | Adjuvants, Anesthesia | |
| | and | |
| | Permeabilizing Agents | |
| Insulin, porcine | Hypoglycemic Agents | |
| Trastuzumab | Antineoplastic Agents | CA2103059 |
| Rituximab | Antineoplastic Agents, | CA2149329 |
| | Immunologic Factors | |
| | and | |
| | Antirheumatic Agents | |
| Basiliximab | Immunosuppressive | CA2038279 |
| | Agents | |
| Muromo b | Immunologic Factors | |
| | and | |
| | Immunosuppressive | |
| | Agents | |
| Digoxin Immune | Antidotes | |
| Fab (Ovine) | | |
| Ibritumomab | | CA2149329 |
| Daptomycin | | U.S. Pat. No. 6,468,967 |
| Tositumomab | | |
| Pegvisomant | Hormone Replacement | U.S. Pat. No. 5,849,535 |
| | Agents | |
| Botulinum Toxin | Neuromuscular | CA2280565 |
| Type A | Blocking Agents, | |
| | Anti-Wrinkle Agents | |
| | and | |
| | Antidystonic Agents | |
| Pancrelipase | Gastrointesti l Agents | |
| | and Enzyme | |
| | Replacement Agents | |
| Streptoki se | Fibrinolytic Agents and | |
| | Thrombolytic Agents | |
| Alemtuzumab | | CA1339198 |
| Alglucerase | Enzyme Replacement | |
| | Agents | |
| Capromab | Indicators, Reagents | |
| | and | |
| | Diagnostic Agents | |
| Laronidase | Enzyme Replacement | |
| | Agents | |
| Urofollitropin | Fertility Agents | U.S. Pat. No. 5,767,067 |
| Efalizumab | Immunosuppressive | |
| | Agents | |
| Serum albumin | Serum substitutes | U.S. Pat. No. 6,723,303 |
| Choriogo dotropin | Fertility Agents and | U.S. Pat. No. 6,706,681 |
| alpha | Go dotropins | |
| Antithymocyte | Immunologic Factors | |
| globulin | and | |
| | Immunosuppressive | |
| | Agents | |
| Filgrastim | Immunosuppressive | CA1341537 |
| | Agents, | |
| | Antineutropenic | |
| | Agents and | |
| | Hematopoietic Agents | |
| Coagulation factor | Coagulants and | |
| ix | Thrombotic Agents | |
| Becaplermin | Angiogenesis Inducing | CA1340846 |
| | Agents | |
| Agalsidase beta | Enzyme Replacement | CA2265464 |
| | Agents | |
| Interferon alpha-2b | Immunosuppressive | CA1341567 |
| | Agents | |
| Oxytocin | Oxytocics, | |
| | Anti-tocolytic Agents | |
| | and Labor Induction | |
| | Agents | |
| Enfuvirtide | HIV Fusion Inhibitors | U.S. Pat. No. 6,475,491 |
| Palivizumab | Antiviral Agents | CA2197684 |
| Daclizumab | Immunosuppressive | |
| | Agents | |
| Bevacizumab | Angiogenesis Inhibitors | CA2286330 |
| Arcitumomab | Diagnostic Agents | U.S. Pat. No. 8,420,081 |
| Arcitumomab | Diagnostic Agents | U.S. Pat. No. 7,790,142 |
| Eculizumab | | CA2189015 |
| Panitumumab | | |
| Ranibizumab | Ophthalmics | CA2286330 |
| Idursulfase | Enzyme Replacement | |
| | Agents | |
| Alglucosidase | Enzyme Replacement | CA2416492 |
| alpha | Agents | |
| Exe tide | Hypoglycemic Agents | U.S. Pat. No. 6,872,700 |
| Mecasermin | | U.S. Pat. No. 5,681,814 |
| Pramlintide | | U.S. Pat. No. 5,686,411 |
| Galsulfase | Enzyme Replacement | |
| | Agents | |
| Abatacept | Antirheumatic Agents | CA2110518 |
| | and | |
| | Immunosuppressive | |
| | Agents | |
| Cosyntropin | Hormones and | |
| | Diagnostic Agents | |
| Corticotropin | | |
| Insulin aspart | Hypoglycemic Agents | U.S. Pat. No. 5,866,538 |
| | and | |
| | Antidiabetic Agents | |
| Insulin detemir | Antidiabetic Agents | U.S. Pat. No. 5,750,497 |
| Insulin glulisine | Antidiabetic Agents | U.S. Pat. No. 6,960,561 |
| Pegaptanib | Intended for the | |
| | prevention of | |
| | respiratory distress | |
| | syndrome | |
| | (RDS) in premature | |
| | infants at high | |
| | risk for RDS. | |
| Nesiritide | | |
| Thymalphasin | | |
| Defibrotide | Antithrombins | |
| tural alpha | | |
| interferon OR | | |
| multiferon | | |
| Glatiramer acetate | | |
| Preotact | | |
| Teicoplanin | Anti-Bacterial Agents | |
| Ca kinumab | Anti-Inflammatory | |
| | Agents and | |
| | Monoclo l antibodies | |
| Ipilimumab | Antineoplastic Agents | CA2381770 |
| | and Monoclo l | |
| | antibodies | |
| Sulodexide | Antithrombins and | |
| | Fibrinolytic Agents and | |
| | Hypoglycemic Agents | |
| | and Anticoagulants and | |
| | Hypolipidemic Agents | |
| Tocilizumab | | CA2201781 |
| Teriparatide | Bone Density | U.S. Pat. No. 6,977,077 |
| | Conservation Agents | |
| Pertuzumab | Monoclo l antibodies | CA2376596 |
| Rilo cept | Immunosuppressive | U.S. Pat. No. 5,844,099 |
| | Agents | |
| Denosumab | Bone Density | CA2257247 |
| | Conservation | |
| | Agents and Monoclo l | |
| | antibodies | |
| Liraglutide | | U.S. Pat. No. 6,268,343 |
| Golimumab | Antipsoriatic Agents and | |
| | Monoclo l | |
| | antibodies and TNF | |
| | inhibitor | |
| Belatacept | Antirheumatic Agents | |
| | and | |
| | Immunosuppressive | |
| | Agents | |
| Buserelin | | |
| Velaglucerase | Enzymes | U.S. Pat. No. 7,138,262 |
| alpha | | |
| Tesamorelin | | U.S. Pat. No. 5,861,379 |
| Brentuximab | | |
| vedotin | | |
| Taliglucerase alpha | Enzymes | |
| Belimumab | Monoclo l antibodies | |
| Aflibercept | Antineoplastic Agents | U.S. Pat. No. 7,306,799 |
| | and Ophthalmics | |
| Asparagi se erwinia | Enzymes | |
| chrysanthemi | | |
| Ocriplasmin | Ophthalmics | |
| Glucarpidase | Enzymes | |
| Teduglutide | | U.S. Pat. No. 5,789,379 |
| Raxibacumab | Anti-Infective Agents | |
| | and Monoclo l | |
| | antibodies | |
| Certolizumab pegol | TNF inhibitor | CA2380298 |
| Insulin, isophane | Hypoglycemic Agents | |
| | and Antidiabetic Agents | |
| Epoetin zeta | | |
| Obinutuzumab | Antineoplastic Agents | |
| Fibrinolysin aka | | U.S. Pat. No. 3,234,106 |
| plasmin | | |
| Follitropin alpha | | |
| Romiplostim | Colony-Stimulating | |
| | Factors and | |
| | Thrombopoietic Agents | |
| lucinactant | Pulmonary surfactants | U.S. Pat. No. 5,407,914 |
| talizumab | Immunosuppressive | |
| | agents | |
| Aliskiren | Renin inhibitor | |
| Ragweed Pollen | | |
| Extract | | |
| Secukinumab | Inhibitor | US20130202610 |
| Somatotropin | Hormone Replacement | CA1326439 |
| Recombi nt | Agents | |
| Drotrecogin alpha | Antisepsis | CA2036894 |
| Alefacept | Dermatologic and | |
| | Immunosupressive | |
| | agents | |
| OspA lipoprotein | Vaccines | |
| Uroki se | | U.S. Pat. No. 4,258,030 |
| Abarelix | Anti-Testosterone | U.S. Pat. No. 5,968,895 |
| | Agents | |
| Sermorelin | Hormone Replacement | |
| | Agents | |
| Aprotinin | | U.S. Pat. No. 5,198,534 |
| Gemtuzumab | Antineoplastic agents | U.S. Pat. No. 5,585,089 |
| ozogamicin | and Immunotoxins | |
| Satumomab | Diagnostic Agents | |
| Pendetide | | |
| Albiglutide | Drugs used in diabetes; | |
| | alimentary tract and | |
| | metabolism; blood | |
| | glucose lowering drugs, | |
| | excl. insulins. | |
| Alirocumab | | |
| Ancestim | | |
| Antithrombin alpha | | |
| Antithrombin III | | |
| human | | |
| Asfotase alpha | Enzymes Alimentary | |
| | Tract and Metabolism | |
| Atezolizumab | | |
| Autologous | | |
| cultured | | |
| chondrocytes | | |
| Beractant | | |
| Bli tumomab | Antineoplastic Agents | US20120328618 |
| | Immunosuppressive | |
| | Agents | |
| | Monoclo l antibodies | |
| | Antineoplastic and | |
| | Immunomodulating | |
| | Agents | |
| C1 Esterase | | |
| Inhibitor | | |
| (Human) | | |
| Coagulation Factor | | |
| XIII A-Subunit | | |
| (Recombi nt) | | |
| Conestat alpha | | |
| Daratumumab | Antineoplastic Agents | |
| Desirudin | | |
| Dulaglutide | Hypoglycemic Agents; | |
| | Drugs Used in Diabetes; | |
| | Alimentary Tract and | |
| | Metabolism; Blood | |
| | Glucose Lowering | |
| | Drugs, Excl. Insulins | |
| Elosulfase alpha | Enzymes; Alimentary | |
| | Tract and Metabolism | |
| Elotuzumab | | US2014055370 |
| Evolocumab | Lipid Modifying Agents, | |
| | Plain; Cardiovascular | |
| | System | |
| Fibrinogen | | |
| Concentrate | | |
| (Human) | | |
| Filgrastim-sndz | | |
| Gastric intrinsic | | |
| factor | | |
| Hepatitis B | | |
| immune globulin | | |
| Human calcitonin | | |
| Human clostridium | | |
| tetani toxoid | | |
| immune globulin | | |
| Human rabies virus | | |
| immune globulin | | |
| Human Rho(D) | | |
| immune globulin | | |
| Hyaluronidase | | U.S. Pat. No. 7,767,429 |
| (Human | | |
| Recombi nt) | | |
| Idarucizumab | Anticoagulant | |
| Immune Globulin | Immunologic Factors; | |
| Human | Immunosuppressive | |
| | Agents; Anti-Infective | |
| | Agents | |
| Vedolizumab | Immunosupressive | US2012151248 |
| | agent, | |
| | Antineoplastic agent | |
| Ustekinumab | Deramtologic agent, | |
| | Immunosuppressive | |
| | agent, | |
| | antineoplastic agent | |
| Turoctocog alpha | | |
| Tuberculin Purified | | |
| Protein Derivative | | |
| Simoctocog alpha | Antihaemorrhagics: | |
| | blood coagulation | |
| | factor VIII | |
| Siltuximab | Antineoplastic and | U.S. Pat. No. 7,612,182 |
| | Immunomodulating | |
| | Agents, | |
| | Immunosuppressive | |
| | Agents | |
| Sebelipase alpha | Enzymes | |
| Sacrosidase | Enzymes | |
| Ramucirumab | Antineoplastic and | US2013067098 |
| | Immunomodulating | |
| | Agents | |
| Prothrombin | | |
| complex | | |
| concentrate | | |
| Poractant alpha | Pulmo ry Surfactants | |
| Pembrolizumab | Antineoplastic and | US2012135408 |
| | Immunomodulating | |
| | Agents | |
| Peginterferon | | |
| beta-1a | | |
| Ofatumumab | Antineoplastic and | U.S. Pat. No. 8,337,847 |
| | Immunomodulating | |
| | Agents | |
| Obiltoxaximab | | |
| Nivolumab | Antineoplastic and | US2013173223 |
| | Immunomodulating | |
| | Agents | |
| Necitumumab | | |
| Metreleptin | | US20070099836 |
| Methoxy | | |
| polyethylene | | |
| glycol-epoetin beta | | |
| Mepolizumab | Antineoplastic and | US2008134721 |
| | Immunomodulating | |
| | Agents, | |
| | Immunosuppressive | |
| | Agents, | |
| | Interleukin Inhibitors | |
| Ixekizumab | | |
| Insulin Pork | Hypoglycemic Agents, | |
| | Antidiabetic Agents | |
| Insulin Degludec | | |
| Insulin Beef | | |
| Thyroglobulin | Hormone therapy | U.S. Pat. No. 5,099,001 |
| Anthrax immune | Plasma derivative | |
| globulin human | | |
| Anti-inhibitor | Blood Coagulation | |
| coagulant | Factors, | |
| complex | Antihemophilic Agent | |
| Anti-thymocyte | Antibody | |
| Globulin (Equine) | | |
| Anti-thymocyte | Antibody | |
| Globulin (Rabbit) | | |
| Brodalumab | Antineoplastic and | |
| | Immunomodulating | |
| | Agents | |
| C1 Esterase | Blood and Blood | |
| Inhibitor | Forming Organs | |
| (Recombi nt) | | |
| Ca kinumab | Antineoplastic and | |
| | Immunomodulating | |
| | Agents | |
| Chorionic Go | Hormones | U.S. Pat. No. 6,706,681 |
| dotropin (Human) | | |
| Chorionic Go | Hormones | U.S. Pat. No. 5,767,251 |
| dotropin | | |
| (Recombi nt) | | |
| Coagulation | Blood Coagulation | |
| factor X human | Factors | |
| Dinutuximab | Antibody, | US20140170155 |
| | Immunosuppresive | |
| | agent, Antineoplastic | |
| | agent | |
| Efmoroctocog | Antihemophilic Factor | |
| alpha | | |
| Factor IX Complex | Antihemophilic agent | |
| (Human) | | |
| Hepatitis A | Vaccine | |
| Vaccine | | |
| Human Varicella- | Antibody | |
| Zoster Immune | | |
| Globulin | | |
| Ibritumomab | Antibody, | CA2149329 |
| tiuxetan | Immunosuppressive | |
| | Agents | |
| Lenograstim | Antineoplastic and | |
| | Immunomodulating | |
| | Agents | |
| Pegloticase | Enzymes | |
| Protamine sulfate | Heparin Antagonists, | |
| | Hematologic Agents | |
| Protein S human | Anticoagulant plasma | |
| | protein | |
| Sipuleucel-T | Antineoplastic and | U.S. Pat. No. 8,153,120 |
| | Immunomodulating | |
| | Agents | |
| Somatropin | Hormones, Hormone | CA1326439, |
| recombi nt | Substitutes, and | CA2252535, |
| | Hormone Antagonists | U.S. Pat. No. 5,288,703, |
| | | U.S. Pat. No. 5,849,700, |
| | | U.S. Pat. No. 5,849,704, |
| | | U.S. Pat. No. 5,898,030, |
| | | U.S. Pat. No. 6,004,297, |
| | | U.S. Pat. No. 6,152,897, |
| | | U.S. Pat. No. 6,235,004, |
| | | U.S. Pat. No. 6,899,699 |
| Susoctocog alpha | Blood coagulation | |
| | factors, | |
| | Antihaemorrhagics | |
| Thrombomodulin | Anticoagulant agent, | |
| alpha | Antiplatelet agent | |

TABLE 29
Exemplary monoclonal antibody therapies.

| mAb | Target | Indication |
|---|---|---|
| Muromonab-CD3 | CD3 | Kidney transplant rejection |
| Abciximab | GPIIb/IIa | Prevention of blood clots in |
| | | angioplasty |
| Rituximab | CD20 | Non-Hodgkin lymphoma |
| Palivizumab | RSV | Prevention of respiratory syncytial |
| | | virus infection |
| Infliximab | TNFα | Crohn's disease |
| Trastuzumab | HER2 | Breast cancer |
| Alemtuzumab | CD52 | Chronic myeloid leukemia |
| Adalimumab | TNFα | Rheumatoid arthritis |
| Ibritumomab | CD20 | Non-Hodgkin lymphoma |
| tiuxetan | | |
| Omalizumab | IgE | Asthma |
| Cetuximab | EGFR | Colorectal cancer |
| Bevacizumab | VEGF-A | Colorectal cancer |
| Natalizumab | ITGA4 | Multiple sclerosis |
| Panitumumab | EGFR | Colorectal cancer |
| Ranibizumab | VEGF-A | Macular degeneration |
| Eculizumab | C5 | Paroxysmal nocturnal |
| | | hemoglobinuria |
| Certolizumab | TNFα | Crohn's disease |
| pegol | | |
| Ustekinumab | IL-12/23 | Psoriasis |
| Canakinumab | IL-1β | Muckle-Wells syndrome |
| Golimumab | TNFα | Rheumatoid and psoriatic arthritis, |
| | | ankylosing spondylitis |
| Ofatumumab | CD20 | Chronic lymphocytic leukemia |
| Tocilizumab | IL-6R | Rheumatoid arthritis |
| Denosumab | RANKL | Bone loss |
| Belimumab | BLyS | Systemic lupus erythematosus |
| Ipilimumab | CTLA-4 | Metastatic melanoma |
| Brentuximab | CD30 | Hodgkin lymphoma, systemic |
| vedotin | | anaplastic large |
| | | cell lymphoma |
| Pertuzumab | HER2 | Breast Cancer |
| Trastuzumab | HER2 | Breast cancer |
| emtansine | | |
| Raxibacumab | B. anthrasis | Anthrax infection |
| | PA | |
| Obinutuzumab | CD20 | Chronic lymphocytic leukemia |
| Siltuximab | IL-6 | Castleman disease |
| Ramucirumab | VEGFR2 | Gastric cancer |
| Vedolizumab | α4β7 | Ulcerative colitis, Crohn disease |
| | integrin | |
| Blinatumomab | CD19, CD3 | Acute lymphoblastic leukemia |
| Nivolumab | PD-1 | Melanoma, non-small cell lung |
| | | cancer |
| Pembrolizumab | PD-1 | Melanoma |
| Idarucizumab | Dabigatran | Reversal of dabigatran-induced |
| | | anticoagulation |
| Necitumumab | EGFR | Non-small cell lung cancer |
| Dinutuximab | GD2 | Neuroblastoma |
| Secukinumab | IL-17α | Psoriasis |
| Mepolizumab | IL-5 | Severe eosinophilic asthma |
| Alirocumab | PCSK9 | High cholesterol |
| Evolocumab | PCSK9 | High cholesterol |
| Daratumumab | CD38 | Multiple myeloma |
| Elotuzumab | SLAMF7 | Multiple myeloma |
| Ixekizumab | IL-17α | Psoriasis |
| Reslizumab | IL-5 | Asthma |
| Olaratumab | PDGFRα | Soft tissue sarcoma |
| Bezlotoxumab | Clostridium | Prevention of Clostridium difficile |
| | difficile | infection recurrence |
| | enterotoxin | |
| | B | |
| Atezolizumab | PD-L1 | Bladder cancer |
| Obiltoxaximab | B. amhrasis | Prevention of inhalational anthrax |
| | PA | |
| Inotuzumab | CD22 | Acute lymphoblastic leukemia |
| ozogamicin | | |
| Brodalumab | IL-17R | Plaque psoriasis |
| Guselkumab | IL-23 p19 | Plaque psoriasis |
| Dupilumab | IL-4Rα | Atopic dermatitis |
| Sarilumab | IL-6R | Rheumatoid arthritis |
| Avelumab | PD-L1 | Merkel cell carcinoma |
| Ocrelizumab | CD20 | Multiple sclerosis |
| Emicizumab | Factor | Hemophilia A |
| | IXa, X | |
| Benralizumab | IL-5Rα | Asthma |
| Gemtuzumab | CD33 | Acute myeloid leukemia |
| ozogamicin | | |
| Durvalumab | PD-L1 | Bladder cancer |
| Burosumab | FGF23 | X-linked hypophosphatemia |
| Lanadelumab | Plasma | Hereditary angioedema attacks |
| | kallikrein | |
| Mogamulizumab | CCR4 | Mycosis fungoides or Sézary |
| | | syndrome |
| Erenumab | CGRPR | Migraine prevention |
| Galcanezumab | CGRP | Migraine prevention |
| Tildrakizumab | IL-23 p19 | Plaque psoriasis |
| Cemiplimab | PD-1 | Cutaneous squamous cell |
| | | carcinoma |
| Emapalumab | IFNγ | Primary hemophagocytic |
| | | lymphohistiocytosis |
| Fremanezumab | CGRP | Migraine prevention |
| Ibalizumab | CD4 | HIV infection |
| Moxetumomab | CD22 | Hairy cell leukemia |
| pasudodox | | |
| Ravulizumab | C5 | Paroxysmal nocturnal |
| | | hemoglobinuria |
| Caplacizumab | von | Acquired thrombotic |
| | Willebrand | thrombocytopenic purpura |
| | factor | |
| Romosozumab | Sclerostin | Osteoporosis in postmenopausal |
| | | women at increased |
| | | risk of fracture |
| Risankizumab | IL-23 p19 | Plaque psoriasis |
| Polatuzumab | CD79β | Diffuse large B-cell lymphoma |
| vedotin | | |
| Brolucizumab | VEGF-A | Macular degeneration |
| Crizanlizumab | P-selectin | Sickle cell disease |

### Plant-Modification Methods

[0602] Gene Writer systems described herein may be used to modify a plant or a plant part (e.g., leaves, roots, flowers, fruits, or seeds), e.g., to increase the fitness of a plant.

[0603] A. Delivery to a Plant

[0604] Provided herein are methods of delivering a Gene Writer system described herein to a plant. Included are methods for delivering a Gene Writer system to a plant by contacting the plant, or part thereof, with a Gene Writer system. The methods are useful for modifying the plant to, e.g., increase the fitness of a plant.

[0605] More specifically, in some embodiments, a nucleic acid described herein (e.g., a nucleic acid encoding a GeneWriter) may be encoded in a vector, e.g., inserted adjacent to a plant promoter, e.g., a maize ubiquitin promoter (ZmUBI) in a plant vector (e.g., pHUC411). In some embodiments, the nucleic acids described herein are introduced into a plant (e.g., japonica rice) or part of a plant (e.g., a callus of a plant) via agrobacteria. In some embodiments, the systems and methods described herein can be used in plants by replacing a plant gene (e.g., hygromycin phosphotransferase (HPT)) with a null allele (e.g., containing a base substitution at the start codon). Systems and methods for modifying a plant genome are described in Xu et. al. Development of plant prime-editing systems for precise genome editing, 2020, Plant Communications.

[0606] In one aspect, provided herein is a method of increasing the fitness of a plant, the method including delivering to the plant the Gene Writer system described herein (e.g., in an effective amount and duration) to increase the fitness of the plant relative to an untreated plant (e.g., a plant that has not been delivered the Gene Writer system).

[0607] An increase in the fitness of the plant as a consequence of delivery of a Gene Writer system can manifest in a number of ways, e.g., thereby resulting in a better production of the plant, for example, an improved yield, improved vigor of the plant or quality of the harvested product from the plant, an improvement in pre- or post-harvest traits deemed desirable for agriculture or horticulture (e.g., taste, appearance, shelf life), or for an improvement of traits that otherwise benefit humans (e.g., decreased allergen production). An improved yield of a plant relates to an increase in the yield of a product (e.g., as measured by plant biomass, grain, seed or fruit yield, protein content, carbohydrate or oil content or leaf area) of the plant by a measurable amount over the yield of the same product of the plant produced under the same conditions, but without the application of the instant compositions or compared with application of conventional plant-modifying agents. For example, yield can be increased by at least about 0.5%, about 1%, about 2%, about 3%, about 4%, about 5%, about 10%, about 20%, about 30%, about 40%, about 50%, about 60%, about 70%, about 80%, about 90%, about 100%, or more than 100%. In some instances, the method is effective to increase yield by about 2×-fold, 5×-fold, 10×-fold, 25×-fold, 50×-fold, 75×-fold, 100×-fold, or more than 100×-fold relative to an untreated plant. Yield can be expressed in terms of an amount by weight or volume of the plant or a product of the plant on some basis. The basis can be expressed in terms of time, growing area, weight of plants produced, or amount of a raw material used. For example, such methods may increase the yield of plant tissues including, but not limited to: seeds, fruits, kernels, bolls, tubers, roots, and leaves.

[0608] An increase in the fitness of a plant as a consequence of delivery of a Gene Writer system can also be measured by other means, such as an increase or improvement of the vigor rating, the stand (the number of plants per unit of area), plant height, stalk circumference, stalk length, leaf number, leaf size, plant canopy, visual appearance (such as greener leaf color), root rating, emergence, protein content, increased tillering, bigger leaves, more leaves, less dead basal leaves, stronger tillers, less fertilizer needed, less seeds needed, more productive tillers, earlier flowering, early grain or seed maturity, less plant verse (lodging), increased shoot growth, earlier germination, or any combination of these factors, by a measurable or noticeable amount over the same factor of the plant produced under the same conditions, but without the administration of the instant compositions or with application of conventional plant-modifying agents (e.g., plant-modifying agents delivered without PMPs).

[0609] Accordingly, provided herein is a method of modifying a plant, the method including delivering to the plant an effective amount of any of the Gene Writer systems provided herein, wherein the method modifies the plant and thereby introduces or increases a beneficial trait in the plant (e.g., by about 1%, 2%, 5%, 10%, 20%, 30%, 40%, 50%, 60%, 70%, 80%, 90%, 100%, or more than 100%) relative to an untreated plant. In particular, the method may increase the fitness of the plant (e.g., by about 1%, 2%, 5%10%, 20%, 30%, 40%, 50%, 60%, 70%, 80%, 90%, 100%, or more than 100%) relative to an untreated plant.

[0610] In some instances, the increase in plant fitness is an increase (e.g., by about 1%, 2%, 5%, 10%, 20%, 30%, 40%, 50%, 60%, 70%, 80%, 90%, 100%, or more than 100%) in disease resistance, drought tolerance, heat tolerance, cold tolerance, salt tolerance, metal tolerance, herbicide tolerance, chemical tolerance, water use efficiency, nitrogen utilization, resistance to nitrogen stress, nitrogen fixation, pest resistance, herbivore resistance, pathogen resistance, yield, yield under water-limited conditions, vigor, growth, photosynthetic capability, nutrition, protein content, carbohydrate content, oil content, biomass, shoot length, root length, root architecture, seed weight, or amount of harvestable produce.

[0611] In some instances, the increase in fitness is an increase (e.g., by about 1%, 2%, 5%, 10%, 20%, 30%, 40%, 50%, 60%, 70%, 80%, 90%, 100%, or more than 100%) in development, growth, yield, resistance to abiotic stressors, or resistance to biotic stressors. An abiotic stress refers to an environmental stress condition that a plant or a plant part is subjected to that includes, e.g., drought stress, salt stress, heat stress, cold stress, and low nutrient stress. A biotic stress refers to an environmental stress condition that a plant or plant part is subjected to that includes, e.g. nematode stress, insect herbivory stress, fungal pathogen stress, bacterial pathogen stress, or viral pathogen stress. The stress may be temporary, e.g. several hours, several days, several months, or permanent, e.g. for the life of the plant.

[0612] In some instances, the increase in plant fitness is an increase (e.g., by about 1%, 2%, 5%, 10%, 20%, 30%, 40%, 50%, 60%, 70%, 80%, 90%, 100%, or more than 100%) in quality of products harvested from the plant. For example, the increase in plant fitness may be an improvement in commercially favorable features (e.g., taste or appearance) of a product harvested from the plant. In other instances, the increase in plant fitness is an increase in shelf-life of a product harvested from the plant (e.g., by about 1%, 2%, 5%, 10%, 20%, 30%, 40%, 50%, 60%, 70%, 80%, 90%, 100%, or more than 100%).

[0613] Alternatively, the increase in fitness may be an alteration of a trait that is beneficial to human or animal health, such as a reduction in allergen production. For example, the increase in fitness may be a decrease (e.g., by about 1%, 2%, 5%, 10%, 20%, 30%, 40%, 50%, 60%, 70%, 80%, 90%, 100%, or more than 100%) in production of an allergen (e.g., pollen) that stimulates an immune response in an animal (e.g., human).

[0614] The modification of the plant (e.g., increase in fitness) may arise from modification of one or more plant parts. For example, the plant can be modified by contacting leaf, seed, pollen, root, fruit, shoot, flower, cells, protoplasts, or tissue (e.g., meristematic tissue) of the plant. As such, in another aspect, provided herein is a method of increasing the fitness of a plant, the method including contacting pollen of the plant with an effective amount of any of the plant-modifying compositions herein, wherein the method increases the fitness of the plant (e.g., by about 1%, 2%, 5%, 10%, 20%, 30%, 40%, 50%, 60%, 70%, 80%, 90%, 100%, or more than 100%) relative to an untreated plant.

[0615] In yet another aspect, provided herein is a method of increasing the fitness of a plant, the method including contacting a seed of the plant with an effective amount of any of the Gene Writer systems disclosed herein, wherein the method increases the fitness of the plant (e.g., by about 1%, 2%, 5%, 10%, 20%, 30%, 40%, 50%, 60%, 70%, 80%, 90%, 100%, or more than 100%) relative to an untreated plant.

[0616] In another aspect, provided herein is a method including contacting a protoplast of the plant with an effective amount of any of the Gene Writer systems described herein, wherein the method increases the fitness of the plant (e.g., by about 1%, 2%, 5%, 10%, 20%, 30%, 40%, 50%, 60%, 70%, 80%, 90%, 100%, or more than 100%) relative to an untreated plant.

[0617] In a further aspect, provided herein is a method of increasing the fitness of a plant, the method including contacting a plant cell of the plant with an effective amount of any of the Gene Writer system described herein, wherein the method increases the fitness of the plant (e.g., by about 1%, 2%, 5%, 10%, 20%, 30%, 40%, 50%, 60%, 70%, 80%, 90%, 100%, or more than 100%) relative to an untreated plant.

[0618] In another aspect, provided herein is a method of increasing the fitness of a plant, the method including contacting meristematic tissue of the plant with an effective amount of any of the plant-modifying compositions herein, wherein the method increases the fitness of the plant (e.g., by about 1%, 2%, 5%10%, 20%, 30%, 40%, 50%, 60%, 70%, 80%, 90%, 100%, or more than 100%) relative to an untreated plant.

[0619] In another aspect, provided herein is a method of increasing the fitness of a plant, the method including contacting an embryo of the plant with an effective amount of any of the plant-modifying compositions herein, wherein the method increases the fitness of the plant (e.g., by about 1%, 2%, 5%, 10%, 20%, 30%, 40%, 50%, 60%, 70%, 80%, 90%, 100%, or more than 100%) relative to an untreated plant.

[0620] B. Application Methods

[0621] A plant described herein can be exposed to any of the Gene Writer system compositions described herein in any suitable manner that permits delivering or administering the composition to the plant. The Gene Writer system may be delivered either alone or in combination with other active (e.g., fertilizing agents) or inactive substances and may be applied by, for example, spraying, injection (e.g, microinjection), through plants, pouring, dipping, in the form of concentrated liquids, gels, solutions, suspensions, sprays, powders, pellets, briquettes, bricks and the like, formulated to deliver an effective concentration of the plant-modifying composition. Amounts and locations for application of the compositions described herein are generally determined by the habitat of the plant, the lifecycle stage at which the plant can be targeted by the plant-modifying composition, the site where the application is to be made, and the physical and functional characteristics of the plant-modifying composition.

[0622] In some instances, the composition is sprayed directly onto a plant, e.g., crops, by e.g., backpack spraying, aerial spraying, crop spraying/dusting etc. In instances where the Gene Writer system is delivered to a plant, the plant receiving the Gene Writer system may be at any stage of plant growth. For example, formulated plant-modifying compositions can be applied as a seed-coating or root treatment in early stages of plant growth or as a total plant treatment at later stages of the crop cycle. In some instances, the plant-modifying composition may be applied as a topical agent to a plant.

[0623] Further, the Gene Writer system may be applied (e.g., in the soil in which a plant grows, or in the water that is used to water the plant) as a systemic agent that is absorbed and distributed through the tissues of a plant. In some instances, plants or food organisms may be genetically transformed to express the Gene Writer system.

[0624] Delayed or continuous release can also be accomplished by coating the Gene Writer system or a composition with the plant-modifying composition(s) with a dissolvable or bioerodable coating layer, such as gelatin, which coating dissolves or erodes in the environment of use, to then make the plant-modifying com Gene Writer system position available, or by dispersing the agent in a dissolvable or erodable matrix. Such continuous release and/or dispensing means devices may be advantageously employed to consistently maintain an effective concentration of one or more of the plant-modifying compositions described herein.

[0625] In some instances, the Gene Writer system is delivered to a part of the plant, e.g., a leaf, seed, pollen, root, fruit, shoot, or flower, or a tissue, cell, or protoplast thereof. In some instances, the Gene Writer system is delivered to a cell of the plant. In some instances, the Gene Writer system is delivered to a protoplast of the plant. In some instances, the Gene Writer system is delivered to a tissue of the plant. For example, the composition may be delivered to meristematic tissue of the plant (e.g., apical meristem, lateral meristem, or intercalary meristem). In some instances, the composition is delivered to permanent tissue of the plant (e.g., simple tissues (e.g., parenchyma, collenchyma, or sclerenchyma) or complex permanent tissue (e.g., xylem or phloem)). In some instances, the Gene Writer system is delivered to a plant embryo.

[0626] C. Plants

[0627] A variety of plants can be delivered to or treated with a Gene Writer system described herein. Plants that can be delivered a Gene Writer system (i.e., “treated”) in accordance with the present methods include whole plants and parts thereof, including, but not limited to, shoot vegetative organs/structures (e.g., leaves, stems and tubers), roots, flowers and floral organs/structures (e.g., bracts, sepals, petals, stamens, carpels, anthers and ovules), seed (including embryo, endosperm, cotyledons, and seed coat) and fruit (the mature ovary), plant tissue (e.g., vascular tissue, ground tissue, and the like) and cells (e.g., guard cells, egg cells, and the like), and progeny of same. Plant parts can further refer parts of the plant such as the shoot, root, stem, seeds, stipules, leaves, petals, flowers, ovules, bracts, branches, petioles, internodes, bark, pubescence, tillers, rhizomes, fronds, blades, pollen, stamen, and the like.

[0628] The class of plants that can be treated in a method disclosed herein includes the class of higher and lower plants, including angiosperms (monocotyledonous and dicotyledonous plants), gymnosperms, ferns, horsetails, psilophytes, lycophytes, bryophytes, and algae (e.g., multicellular or unicellular algae). Plants that can be treated in accordance with the present methods further include any vascular plant, for example monocotyledons or dicotyledons or gymnosperms, including, but not limited to alfalfa, apple, Arabidopsis, banana, barley, canola, castor bean, chrysanthemum, clover, cocoa, coffee, cotton, cottonseed, corn, crambe, cranberry, cucumber, dendrobium, dioscorea, eucalyptus, fescue, flax, gladiolus, liliacea, linseed, millet, muskmelon, mustard, oat, oil palm, oilseed rape, papaya, peanut, pineapple, ornamental plants, Phaseolus, potato, rapeseed, rice, rye, ryegrass, safflower, sesame, sorghum, soybean, sugarbeet, sugarcane, sunflower, strawberry, tobacco, tomato, turfgrass, wheat and vegetable crops such as lettuce, celery, broccoli, cauliflower, cucurbits; fruit and nut trees, such as apple, pear, peach, orange, grapefruit, lemon, lime, almond, pecan, walnut, hazel; vines, such as grapes (e.g., a vineyard), kiwi, hops; fruit shrubs and brambles, such as raspberry, blackberry, gooseberry; forest trees, such as ash, pine, fir, maple, oak, chestnut, popular; with alfalfa, canola, castor bean, corn, cotton, crambe, flax, linseed, mustard, oil palm, oilseed rape, peanut, potato, rice, safflower, sesame, soybean, sugarbeet, sunflower, tobacco, tomato, and wheat. Plants that can be treated in accordance with the methods of the present invention include any crop plant, for example, forage crop, oilseed crop, grain crop, fruit crop, vegetable crop, fiber crop, spice crop, nut crop, turf crop, sugar crop, beverage crop, and forest crop. In certain instances, the crop plant that is treated in the method is a soybean plant. In other certain instances, the crop plant is wheat. In certain instances, the crop plant is corn. In certain instances, the crop plant is cotton. In certain instances, the crop plant is alfalfa. In certain instances, the crop plant is sugarbeet. In certain instances, the crop plant is rice. In certain instances, the crop plant is potato. In certain instances, the crop plant is tomato.

[0629] In certain instances, the plant is a crop. Examples of such crop plants include, but are not limited to, monocotyledonous and dicotyledonous plants including, but not limited to, fodder or forage legumes, ornamental plants, food crops, trees, or shrubs selected from Acer spp., Allium spp., Amaranthus spp., Ananas comosus, Apium graveolens, Arachis spp, Asparagus officinalis, Beta vulgaris, Brassica spp. (e.g., Brassica napus, Brassica rapa ssp. (canola, oilseed rape, turnip rape), Camellia sinensis, Canna indica, Cannabis saliva, Capsicum spp., Castanea spp., Cichorium endivia, Citrullus lanatus, Citrus spp., Cocos spp., Coffea spp., Coriandrum sativum, Corylus spp., Crataegus spp., Cucurbita spp., Cucumis spp., Daucus carota, Fagus spp., Ficus carica, Fragaria spp., Ginkgo biloba, Glycine spp. (e.g., Glycine max, Soja hispida or Soja max), Gossypium hirsutum, Helianthus spp. (e.g., Helianthus annuus), Hibiscus spp., Hordeum spp. (e.g., Hordeum vulgare), Ipomoea batatas, Juglans spp., Lactuca sativa, Linum usitatissimum, Litchi chinensis, Lotus spp., Luffa acutangula, Lupinus spp., Lycopersicon spp. (e.g., Lycopersicon esculenturn, Lycopersicon lycopersicum, Lycopersicon pyriforme), Malus spp., Medicago sativa, Mentha spp., Miscanthus sinensis, Morus nigra, Musa spp., Nicotiana spp., Olea spp., Oryza spp. (e.g., Oryza sativa, Oryza latifolia), Panicum miliaceum, Panicum virgatum, Passiflora edulis, Petroselinum crispum, Phaseolus spp., Pinus spp., Pistacia vera, Pisum spp., Poa spp., Populus spp., Prunus spp., Pyrus communis, Quercus spp., Raphanus sativus, Rheum rhabarbarum, Ribes spp., Ricinus communis, Rubus spp., Saccharum spp., Salix sp., Sambucus spp., Secale cereale, Sesamum spp., Sinapis spp., Solanum spp. (e.g., Solanum tuberosum, Solanum integrifolium or Solanum lycopersicum), Sorghum bicolor, Sorghum halepense, Spinacia spp., Tamarindus indica, Theobroma cacao, Trifolium spp., Triticosecale rimpaui, Triticum spp. (e.g., Triticum aestivum, Triticum durum, Triticum turgidum, Triticum hybernum, Triticum macha, Triticum sativum or Triticum vulgare), Vaccinium spp., Vicia spp., Vigna spp., Viola odorata, Vitis spp., and Zea mays. In certain embodiments, the crop plant is rice, oilseed rape, canola, soybean, corn (maize), cotton, sugarcane, alfalfa, sorghum, or wheat.

[0630] The plant or plant part for use in the present invention include plants of any stage of plant development. In certain instances, the delivery can occur during the stages of germination, seedling growth, vegetative growth, and reproductive growth. In certain instances, delivery to the plant occurs during vegetative and reproductive growth stages. In some instances, the composition is delivered to pollen of the plant. In some instances, the composition is delivered to a seed of the plant. In some instances, the composition is delivered to a protoplast of the plant. In some instances, the composition is delivered to a tissue of the plant. For example, the composition may be delivered to meristematic tissue of the plant (e.g., apical meristem, lateral meristem, or intercalary meristem). In some instances, the composition is delivered to permanent tissue of the plant (e.g., simple tissues (e.g., parenchyma, collenchyma, or sclerenchyma) or complex permanent tissue (e.g., xylem or phloem)). In some instances, the composition is delivered to a plant embryo. In some instances, the composition is delivered to a plant cell. The stages of vegetative and reproductive growth are also referred to herein as “adult” or “mature” plants.

[0631] In instances where the Gene Writer system is delivered to a plant part, the plant part may be modified by the plant-modifying agent. Alternatively, the Gene Writer system may be distributed to other parts of the plant (e.g., by the plant's circulatory system) that are subsequently modified by the plant-modifying agent.

### Administration and Delivery Modalities

[0632] Nucleic acid elements of systems provided by the invention, used in the methods provided by the invention, can be delivered by a variety of modalities. In embodiments where the system comprises two separate nucleic acid molecules (e.g., the retrotransposase and template nucleic acids are separate molecules), the two molecules may be delivered by the same modality, while in other embodiments, the two molecules are delivered by different modalities. The composition and systems described herein may be used in vitro or in vivo. In some embodiments the system or components of the system are delivered to cells (e.g., mammalian cells, e.g., human cells), e.g., in vitro, ex vivo, or in vivo. In some embodiments, the cells are eukaryotic cells, e.g., cells of a multicellular organism, e.g., an animal, e.g., a mammal (e.g., human, swine, bovine) a bird (e.g., poultry, such as chicken, turkey, or duck), or a fish. In some embodiments, the cells are non-human animal cells (e.g., a laboratory animal, a livestock animal, or a companion animal). In some embodiments, the cell is a stem cell (e.g., a hematopoietic stem cell), a fibroblast, or a T cell. In some embodiments, the cell is a non-dividing cell, e.g., a non-dividing fibroblast or non-dividing T cell. The skilled artisan will understand that the components of the Gene Writer system may be delivered in the form of polypeptide, nucleic acid (e.g., DNA, RNA), and combinations thereof.

[0633] For instance, delivery can use any of the following combinations for delivering the retrotransposase (e.g., as DNA encoding the retrotransposase protein, as RNA encoding the retrotransposase protein, or as the protein itself) and the template RNA (e.g., as DNA encoding the RNA, or as RNA):

[0634] 1. Retrotransposase DNA+template DNA

[0635] 2. Retrotransposase RNA+template DNA

[0636] 3. Retrotransposase DNA+template RNA

[0637] 4. Retrotransposase RNA+template RNA

[0638] 5. Retrotransposase protein+template DNA

[0639] 6. Retrotransposase protein+template RNA

[0640] 7. Retrotransposase virus+template virus

[0641] 8. Retrotransposase virus+template DNA

[0642] 9. Retrotransposase virus+template RNA

[0643] 10. Retrotransposase DNA+template virus

[0644] 11. Retrotransposase RNA+template virus

[0645] 12. Retrotransposase protein+template virus

[0646] As indicated above, in some embodiments, the DNA or RNA that encodes the retrotransposase protein is delivered using a virus, and in some embodiments, the template RNA (or the DNA encoding the template RNA) is delivered using a virus.

[0647] In one embodiments the system and/or components of the system are delivered as nucleic acid. For example, the Gene Writer polypeptide may be delivered in the form of a DNA or RNA encoding the polypeptide, and the template RNA may be delivered in the form of RNA or its complementary DNA to be transcribed into RNA. In some embodiments the system or components of the system are delivered on 1, 2, 3, 4, or more distinct nucleic acid molecules. In some embodiments the system or components of the system are delivered as a combination of DNA and RNA. In some embodiments the system or components of the system are delivered as a combination of DNA and protein. In some embodiments the system or components of the system are delivered as a combination of RNA and protein. In some embodiments the Gene Writer genome editor polypeptide is delivered as a protein.

[0648] In some embodiments the system or components of the system are delivered to cells, e.g. mammalian cells or human cells, using a vector. The vector may be, e.g., a plasmid or a virus. In some embodiments delivery is in vivo, in vitro, ex vivo, or in situ. In some embodiments the virus is an adeno associated virus (AAV), a lentivirus, an adenovirus. In some embodiments the system or components of the system are delivered to cells with a viral-like particle or a virosome. In some embodiments the delivery uses more than one virus, viral-like particle or virosome.

[0649] In one embodiment, the compositions and systems described herein can be formulated in liposomes or other similar vesicles. Liposomes are spherical vesicle structures composed of a uni- or multilamellar lipid bilayer surrounding internal aqueous compartments and a relatively impermeable outer lipophilic phospholipid bilayer. Liposomes may be anionic, neutral or cationic. Liposomes are biocompatible, nontoxic, can deliver both hydrophilic and lipophilic drug molecules, protect their cargo from degradation by plasma enzymes, and transport their load across biological membranes and the blood brain barrier (BBB) (see, e.g., Spuch and Navarro, Journal of Drug Delivery, vol. 2011, Article ID 469679, 12 pages, 2011. doi:10.1155/2011/469679 for review).

[0650] Vesicles can be made from several different types of lipids; however, phospholipids are most commonly used to generate liposomes as drug carriers. Methods for preparation of multilamellar vesicle lipids are known in the art (see for example U.S. Pat. No. 6,693,086, the teachings of which relating to multilamellar vesicle lipid preparation are incorporated herein by reference). Although vesicle formation can be spontaneous when a lipid film is mixed with an aqueous solution, it can also be expedited by applying force in the form of shaking by using a homogenizer, sonicator, or an extrusion apparatus (see, e.g., Spuch and Navarro, Journal of Drug Delivery, vol. 2011, Article ID 469679, 12 pages, 2011. doi:10.1155/2011/469679 for review). Extruded lipids can be prepared by extruding through filters of decreasing size, as described in Templeton et al., Nature Biotech, 15:647-652, 1997, the teachings of which relating to extruded lipid preparation are incorporated herein by reference.

[0651] Lipid nanoparticles are another example of a carrier that provides a biocompatible and biodegradable delivery system for the pharmaceutical compositions described herein. Nanostructured lipid carriers (NLCs) are modified solid lipid nanoparticles (SLNs) that retain the characteristics of the SLN, improve drug stability and loading capacity, and prevent drug leakage. Polymer nanoparticles (PNPs) are an important component of drug delivery. These nanoparticles can effectively direct drug delivery to specific targets and improve drug stability and controlled drug release. Lipid-polymer nanoparticles (PLNs), a new type of carrier that combines liposomes and polymers, may also be employed. These nanoparticles possess the complementary advantages of PNPs and liposomes. A PLN is composed of a core-shell structure; the polymer core provides a stable structure, and the phospholipid shell offers good biocompatibility. As such, the two components increase the drug encapsulation efficiency rate, facilitate surface modification, and prevent leakage of water-soluble drugs. For a review, see, e.g., Li et al. 2017, Nanomaterials 7, 122; doi:10.3390/nano7060122.

[0652] Exosomes can also be used as drug delivery vehicles for the compositions and systems described herein. For a review, see Ha et al. July 2016. Acta Pharmaceutica Sinica B. Volume 6, Issue 4, Pages 287-296; https://doi.org/10.1016/j.apsb.2016.02.001.

[0653] A Gene Writer system can be introduced into cells, tissues and multicellular organisms. In some embodiments the system or components of the system are delivered to the cells via mechanical means or physical means.

[0654] Formulation of protein therapeutics is described in Meyer (Ed.), Therapeutic Protein Drug Products: Practical Approaches to formulation in the Laboratory, Manufacturing, and the Clinic, Woodhead Publishing Series (2012).

[0655] All publications, patent applications, patents, and other publications and references (e.g., sequence database reference numbers) cited herein are incorporated by reference in their entirety. For example, all GenBank, Unigene, and Entrez sequences referred to herein, e.g., in any Table herein, are incorporated by reference. Unless otherwise specified, the sequence accession numbers specified herein, including in any Table herein, refer to the database entries current as of Mar. 4, 2020. When one gene or protein references a plurality of sequence accession numbers, all of the sequence variants are encompassed.

### EXAMPLES

[0656] The invention is further illustrated by the following examples. The examples are provided for illustrative purposes only and are not to be construed as limiting the scope or content of the invention in any way.

### Example 1: Internal Gene Writer Deletions Demonstrating Protein Domain Modularity

[0657] This example describes deletions in a Gene Writer polypeptide that retain functionality and further demonstrate the modularity of the DNA binding domain.

[0658] In this example, a series of experiments were performed to test the activity of various mutant retrotransposases, as well as gaining structural knowledge about the protein modularity. This experiment tested removing a polypeptide stretch after the c-myb motif in the DNA binding domain (DBD) and replacing it with a flexible linker (FIG. 1a). The polypeptide stretch removed is referred to as the “natural linker” since it is the intervening region between the DNA binding motifs and the RNA binding domain. The polypeptide region removed spans the following: on the N terminal side at either, location A (predicted random coil following c-myb motif) or location B (end of predicted alpha helix that contains part of the c-myb motif) and the removed region ends at either location v1 (alpha helical region of R2Tg that preceded the predicted −1 RNA binding motif or at location v2 (C-terminal side of an alpha helical region of R2Tg that preceded the predicted −1 RNA binding motif). In place of the polypeptide stretch removed, “natural linker”, is the either of two linkers (Linker A, XTEN: SGSETPGTSESATPES (SEQ ID NO: 1023), and Linker B, 3GS: GGGS (SEQ ID NO: 1024)). For each of these mutant retrotransposases that contain different removed regions (location A-v1, location A-v2, location B-v1, or location B-v2) they were replaced with either linker A or linker B by PCR to a DNA plasmid that expressed R2Tg, thereby yielding these sequences: c-mybA-v1 replaced with 3GS (SEQ ID NO: 1024) linker, c-mybA-v2 replaced with 3GS linker (SEQ ID NO: 1024), c-mybA-v1 replaced with XTEN linker, c-mybA-v2 replaced with XTEN linker, c-mybB-v1 replaced with 3GS linker (SEQ ID NO: 1024), c-mybB-v2 replaced with 3GS linker (SEQ ID NO: 1024), c-mybB-v1 replaced with XTEN linker, c-mybB-v2 replaced with XTEN linker, as shown in Table E1 below. The insertion of the linkers was verified by Sanger sequencing and the DNA plasmids were purified for transfection.

TABLE E1
Amino acid sequences of R2Tg mutants with linkers in
place of the “natural linker” region that intervenes
the DNA binding domain (DBD) and RNA binding domain.
The N-terminal DNA-binding domain is italicized and
the linker connecting to the rest of the protein is
in bold and underlined.

| R2Tg | | SEQ ID |
|---|---|---|
| Mutant | Amino Acid Sequence | NO: |
| R2Tg with | MASCPKPGPPVSAGAMSLESGLTTHSVLAIERGPNSLANSGSDFGGGGL | 1650 |
| natural linker | GLPLRLLRVSVGTQTSRSDWVDLVSWSHPGPTSKSQQVDLVSLFPKHRV | |
| deletion c- | DLLSKNDQVDLVAQFLPSKFPPNLAENDLALLVNLEFYRSDLHVYECVH | |
| mybA | FAAHWEGLSGLPEVYEQLAPQPCVGETLHSSLPRDSELFVPEEGSSEKE | |
| location - v1 | SEDAPKTSPPTPGKHGLEQTGEEKVMVTVPDKNPPCPCCGTRVNSVLNL | |
| replaced with | IEHLKVSHGKRGVCFRCAKCGKENSNYHSVVCHFPKCRGPETEKAPAGE | |
| 3GS linker | WICEVCNRDFTTKIGLGQHKRLAHPAVRNQERIVASQPKETSNRGAHKR | |
| (SEQ ID NO: | CWTKEEEELLIRLEAQFEGNKNINKLIAEHITTKTAKQISDKRRLLSRK | |
| 1024) | PAEEPREEPGTCHHTRRAAGGGSCFGCLESISQIRTATRDKKDTVTREK | |
| | HPKKPFQKWMKDRAIKKGNYLRFQRLFYLDRGKLAKIILDDIECLSCDI | |
| | PLSEIYSVFKTRWETTGSFKSLGDFKTYGKADNTAFRELITAKEIEKNV | |
| | QEMSKGSAPGPDGITLGDVVKMDPEFSRTMEIFNLWLTTGKIPDMVRGC | |
| | RTVLIPKSSKPDRLKDINNWRPITIGSILLRLFSRIVTARLSKACPLNP | |
| | RQRGFIRAAGCSENLKLLQTIIWSAKREHRPLGVVFVDIAKAFDTVSHQ | |
| | HIIHALQQREVDPHIVGLVSNMYENISTYITTKRNTHTDKIQIRVGVKQ | |
| | GDPMSPLLFNLAMDPLLCKLEESGKGYHRGQSSITAMAFADDLVLLSDS | |
| | WENMNTNISILETFCNLTGLKTQGQKCHGFYIKPTKDSYTINDCAAWTI | |
| | NGTPLNMIDPGESEKYLGLQFDPWIGIARSGLSTKLDFWLQRIDQAPLK | |
| | PLQKTDILKTYTIPRLIYIADHSEVKTALLETLDQKIRTAVKEWLHLPP | |
| | CTCDAILYSSTRDGGLGITKLAGLIPSVQARRLHRIAQSSDDTMKCFME | |
| | KEKMEQLHKKLWIQAGGDRENIPSIWEAPPSSEPPNNVSTNSEWEAPTQ | |
| | KDKFPKPCNWRKNEFKKWTKLASQGRGIVNFERDKISNHWIQYYRRIPH | |
| | RKLLTALQLRANVYPTREFLARGRQDQYIKACRHCDADIESCAHIIGNC | |
| | PVTQDARIKRHNYICELLLEEAKKKDWVVFKEPHIRDSNKELYKPDLIF | |
| | VKDARALVVDVTVRYEAAKSSLEEAAAEKVRKYKHLETEVRHLTNAKDV | |
| | TFVGFPLGARGKWHQDNFKLLTELGLSKSRQVKMAETFSTVALFSSVDI | |
| | VHMFASRARKSMVM | |
| R2Tg with | MASCPKPGPPVSAGAMSLESGLTTHSVLAIERGPNSLANSGSDFGGGGL | 1651 |
| natural linker | GLPLRLLRVSVGTQTSRSDWVDLVSWSHPGPTSKSQQVDLVSLFPKHRV | |
| deletion c- | DLLSKNDQVDLVAQFLPSKFPPNLAENDLALLVNLEFYRSDLHVYECVH | |
| mybA | FAAHWEGLSGLPEVYEQLAPQPCVGETLHSSLPRDSELFVPEEGSSEKE | |
| location - v2 | SEDAPKTSPPTPGKHGLEQTGEEKVMVTVPDKNPPCPCCGTRVNSVLNL | |
| replaced with | IEHLKVSHGKRGVCFRCAKCGKENSNYHSVVCHFPKCRGPETEKAPAGE | |
| 3GS linker | WICEVCNRDFTTKIGLGQHKRLAHPAVRNQERIVASQPKETSNRGAHKR | |
| (SEQ ID NO: | CWTKEEEELLIRLEAQFEGNKNINKLIAEHITTKTAKQISDKRRLLSRK | |
| 1024) | PAEEPREEPGTCHHTRRAAGGGSTATRDKKDTVTREKHPKKPFQKWMKD | |
| | RAIKKGNYLRFQRLFYLDRGKLAKIILDDIECLSCDIPLSEIYSVFKTR | |
| | WETTGSFKSLGDFKTYGKADNTAFRELITAKEIEKNVQEMSKGSAPGPD | |
| | GITLGDVVKMDPEFSRTMEIFNLWLTTGKIPDMVRGCRTVLIPKSSKPD | |
| | RLKDINNWRPITIGSILLRLFSRIVTARLSKACPLNPRQRGFIRAAGCS | |
| | ENLKLLQTIIWSAKREHRPLGVVFVDIAKAFDTVSHQHIIHALQQREVD | |
| | PHIVGLVSNMYENISTYITTKRNTHTDKIQIRVGVKQGDPMSPLLFNLA | |
| | MDPLLCKLEESGKGYHRGQSSITAMAFADDLVLLSDSWENMNTNISILE | |
| | TFCNLTGLKTQGQKCHGFYIKPTKDSYTINDCAAWTINGTPLNMIDPGE | |
| | SEKYLGLQFDPWIGIARSGLSTKLDFWLQRIDQAPLKPLQKTDILKTYT | |
| | IPRLIYIADHSEVKTALLETLDQKIRTAVKEWLHLPPCTCDAILYSSTR | |
| | DGGLGITKLAGLIPSVQARRLHRIAQSSDDTMKCFMEKEKMEQLHKKLW | |
| | IQAGGDRENIPSIWEAPPSSEPPNNVSTNSEWEAPTQKDKFPKPCNWRK | |
| | NEFKKWTKLASQGRGIVNFERDKISNHWIQYYRRIPHRKLLTALQLRAN | |
| | VYPTREFLARGRQDQYIKACRHCDADIESCAHIIGNCPVTQDARIKRHN | |
| | YICELLLEEAKKKDWVVFKEPHIRDSNKELYKPDLIFVKDARALVVDVT | |
| | VRYEAAKSSLEEAAAEKVRKYKHLETEVRHLTNAKDVTFVGFPLGARGK | |
| | WHQDNFKLLTELGLSKSRQVKMAETFSTVALFSSVDIVHMFASRARKSM | |
| | VM | |
| R2Tg with | MASCPKPGPPVSAGAMSLESGLTTHSVLAIERGPNSLANSGSDFGGGGL | 1652 |
| natural linker | GLPLRLLRVSVGTQTSRSDWVDLVSWSHPGPTSKSQQVDLVSLFPKHRV | |
| deletion c- | DLLSKNDQVDLVAQFLPSKFPPNLAENDLALLVNLEFYRSDLHVYECVH | |
| mybA | FAAHWEGLSGLPEVYEQLAPQPCVGETLHSSLPRDSELFVPEEGSSEKE | |
| location - v1 | SEDAPKTSPPTPGKHGLEQTGEEKVMVTVPDKNPPCPCCGTRVNSVLNL | |
| replaced with | IEHLKVSHGKRGVCFRCAKCGKENSNYHSVVCHFPKCRGPETEKAPAGE | |
| XTEN linker | WICEVCNRDFTTKIGLGQHKRLAHPAVRNQERIVASQPKETSNRGAHKR | |
| | CWTKEEEELLIRLEAQFEGNKNINKLIAEHITTKTAKQISDKRRLLSRK | |
| | PAEEPREEPGTCHHTRRAASGSETPGTSESATPESCFGCLESISQIRTA | |
| | TRDKKDTVTREKHPKKPFQKWMKDRAIKKGNYLRFQRLFYLDRGKLAKI | |
| | ILDDIECLSCDIPLSEIYSVFKTRWETTGSFKSLGDFKTYGKADNTAFR | |
| | ELITAKEIEKNVQEMSKGSAPGPDGITLGDVVKMDPEFSRTMEIFNLWL | |
| | TTGKIPDMVRGCRTVLIPKSSKPDRLKDINNWRPITIGSILLRLFSRIV | |
| | TARLSKACPLNPRQRGFIRAAGCSENLKLLQTIIWSAKREHRPLGVVFV | |
| | DIAKAFDTVSHQHIIHALQQREVDPHIVGLVSNMYENISTYITTKRNTH | |
| | TDKIQIRVGVKQGDPMSPLLFNLAMDPLLCKLEESGKGYHRGQSSITAM | |
| | AFADDLVLLSDSWENMNTNISILETFCNLTGLKTQGQKCHGFYIKPTKD | |
| | SYTINDCAAWTINGTPLNMIDPGESEKYLGLQFDPWIGIARSGLSTKLD | |
| | FWLQRIDQAPLKPLQKTDILKTYTIPRLIYIADHSEVKTALLETLDQKI | |
| | RTAVKEWLHLPPCTCDAILYSSTRDGGLGITKLAGLIPSVQARRLHRIA | |
| | QSSDDTMKCFMEKEKMEQLHKKLWIQAGGDRENIPSIWEAPPSSEPPNN | |
| | VSTNSEWEAPTQKDKFPKPCNWRKNEFKKWTKLASQGRGIVNFERDKIS | |
| | NHWIQYYRRIPHRKLLTALQLRANVYPTREFLARGRQDQYIKACRHCDA | |
| | DIESCAH11GNCPVTQDARIKRHNYICELLLEEAKKKDWVVFKEPHIRD | |
| | SNKELYKPDLIFVKDARALVVDVTVRYEAAKSSLEEAAAEKVRKYKHLE | |
| | TEVRHLTNAKDVTFVGFPLGARGKWHQDNFKLLTELGLSKSRQVKMAET | |
| | FSTVALFSSVDIVHMFASRARKSMVM | |
| R2Tg with | MASCPKPGPPVSAGAMSLESGLTTHSVLAIERGPNSLANSGSDFGGGGL | 1653 |
| natural linker | GLPLRLLRVSVGTQTSRSDWVDLVSWSHPGPTSKSQQVDLVSLFPKHRV | |
| deletion c- | DLLSKNDQVDLVAQFLPSKFPPNLAENDLALLVNLEFYRSDLHVYECVH | |
| mybA | FAAHWEGLSGLPEVYEQLAPQPCVGETLHSSLPRDSELFVPEEGSSEKE | |
| location - v2 | SEDAPKTSPPTPGKHGLEQTGEEKVMVTVPDKNPPCPCCGTRVNSVLNL | |
| replaced with | IEHLKVSHGKRGVCFRCAKCGKENSNYHSVVCHFPKCRGPETEKAPAGE | |
| XTEN linker | WICEVCNRDFTTKIGLGQHKRLAHPAVRNQERIVASQPKETSNRGAHKR | |
| | CWTKEEEELLIRLEAQFEGNKNINKLIAEHITTKTAKQISDKRRLLSRK | |
| | PAEEPREEPGTCHHTRRAASGSETPGTSESATPESTATRDKKDTVTREK | |
| | HPKKPFQKWMKDRAIKKGNYLRFQRLFYLDRGKLAKIILDDIECLSCDI | |
| | PLSEIYSVFKTRWETTGSFKSLGDFKTYGKADNTAFRELITAKEIEKNV | |
| | QEMSKGSAPGPDGITLGDVVKMDPEFSRTMEIFNLWLTTGKIPDMVRGC | |
| | RTVLIPKSSKPDRLKDINNWRPITIGSILLRLFSRIVTARLSKACPLNP | |
| | RQRGFIRAAGCSENLKLLQTIIWSAKREHRPLGVVFVDIAKAFDTVSHQ | |
| | HIIHALQQREVDPHIVGLVSNMYENISTYITTKRNTHTDKIQIRVGVKQ | |
| | GDPMSPLLFNLAMDPLLCKLEESGKGYHRGQSSITAMAFADDLVLLSDS | |
| | WENMNTNISILETFCNLTGLKTQGQKCHGFYIKPTKDSYTINDCAAWTI | |
| | NGTPLNMIDPGESEKYLGLQFDPWIGIARSGLSTKLDFWLQRIDQAPLK | |
| | PLQKTDILKTYTIPRLIYIADHSEVKTALLETLDQKIRTAVKEWLHLPP | |
| | CTCDAILYSSTRDGGLGITKLAGLIPSVQARRLHRIAQSSDDTMKCFME | |
| | KEKMEQLHKKLWIQAGGDRENIPSIWEAPPSSEPPNNVSTNSEWEAPTQ | |
| | KDKFPKPCNWRKNEFKKWTKLASQGRGIVNFERDKISNHWIQYYRRIPH | |
| | RKLLTALQLRANVYPTREFLARGRQDQYIKACRHCDADIESCAHIIGNC | |
| | PVTQDARIKRHNYICELLLEEAKKKDWVVFKEPHIRDSNKELYKPDLIF | |
| | VKDARALVVDVTVRYEAAKSSLEEAAAEKVRKYKHLETEVRHLTNAKDV | |
| | TFVGFPLGARGKWHQDNFKLLTELGLSKSRQVKMAETFSTVALFSSVDI | |
| | VHMFASRARKSMVM | |
| R2Tg with | MASCPKPGPPVSAGAMSLESGLTTHSVLAIERGPNSLANSGSDFGGGGL | 1654 |
| natural linker | GLPLRLLRVSVGTQTSRSDWVDLVSWSHPGPTSKSQQVDLVSLFPKHRV | |
| deletion c- | DLLSKNDQVDLVAQFLPSKFPPNLAENDLALLVNLEFYRSDLHVYECVH | |
| mybB | FAAHWEGLSGLPEVYEQLAPQPCVGETLHSSLPRDSELFVPEEGSSEKE | |
| location - v1 | SEDAPKTSPPTPGKHGLEQTGEEKVMVTVPDKNPPCPCCGTRVNSVLNL | |
| replaced with | IEHLKVSHGKRGVCFRCAKCGKENSNYHSVVCHFPKCRGPETEKAPAGE | |
| 3GS linker | WICEVCNRDFTTKIGLGQHKRLAHPAVRNQERIVASQPKETSNRGAHKR | |
| (SEQ ID NO: | CWTKEEEELLIRLEAQFEGNKNINKLIAEHITTKTAKQISDKRRLGGGS | |
| 1024) | CFGCLESISQIRTATRDKKDTVTREKHPKKPFQKWMKDRAIKKGNYLRF | |
| | QRLFYLDRGKLAKIILDDIECLSCDIPLSEIYSVFKTRWETTGSFKSLG | |
| | DFKTYGKADNTAFRELITAKEIEKNVQEMSKGSAPGPDGITLGDVVKMD | |
| | PEFSRTMEIFNLWLTTGKIPDMVRGCRTVLIPKSSKPDRLKDINNWRPI | |
| | TIGSILLRLFSRIVTARLSKACPLNPRQRGFIRAAGCSENLKLLQTIIW | |
| | SAKREHRPLGVVFVDIAKAFDTVSHQHIIHALQQREVDPHIVGLVSNMY | |
| | ENISTYITTKRNTHTDKIQIRVGVKQGDPMSPLLFNLAMDPLLCKLEES | |
| | GKGYHRGQSSITAMAFADDLVLLSDSWENMNTNISILETFCNLTGLKTQ | |
| | GQKCHGFYIKPTKDSYTINDCAAWTINGTPLNMIDPGESEKYLGLQFDP | |
| | WIGIARSGLSTKLDFWLQRIDQAPLKPLQKTDILKTYTIPRLIYIADHS | |
| | EVKTALLETLDQKIRTAVKEWLHLPPCTCDAILYSSTRDGGLGITKLAG | |
| | LIPSVQARRLHRIAQSSDDTMKCFMEKEKMEQLHKKLWIQAGGDRENIP | |
| | SIWEAPPSSEPPNNVSTNSEWEAPTQKDKFPKPCNWRKNEFKKWTKLAS | |
| | QGRGIVNFERDKISNHWIQYYRRIPHRKLLTALQLRANVYPTREFLARG | |
| | RQDQYIKACRHCDADIESCAH11GNCPVTQDARIKRHNYICELLLEEAK | |
| | KKDWVVFKEPHIRDSNKELYKPDLIFVKDARALVVDVTVRYEAAKSSLE | |
| | EAAAEKVRKYKHLETEVRHLTNAKDVTFVGFPLGARGKWHQDNFKLLTE | |
| | LGLSKSRQVKMAETFSTVALFSSVDIVHMFASRARKSMVM | |
| R2Tg with | MASCPKPGPPVSAGAMSLESGLTTHSVLAIERGPNSLANSGSDFGGGGL | 1655 |
| natural linker | GLPLRLLRVSVGTQTSRSDWVDLVSWSHPGPTSKSQQVDLVSLFPKHRV | |
| deletion c- | DLLSKNDQVDLVAQFLPSKFPPNLAENDLALLVNLEFYRSDLHVYECVH | |
| mybB | FAAHWEGLSGLPEVYEQLAPQPCVGETLHSSLPRDSELFVPEEGSSEKE | |
| location - v2 | SEDAPKTSPPTPGKHGLEQTGEEKVMVTVPDKNPPCPCCGTRVNSVLNL | |
| replaced with | IEHLKVSHGKRGVCFRCAKCGKENSNYHSVVCHFPKCRGPETEKAPAGE | |
| 3GS linker | WICEVCNRDFTTKIGLGQHKRLAHPAVRNQERIVASQPKETSNRGAHKR | |
| (SEQ ID NO: | CWTKEEEELLIRLEAQFEGNKNINKLIAEHITTKTAKQISDKRRLGGGS | |
| 1024) | TATRDKKDTVTREKHPKKPFQKWMKDRAIKKGNYLRFQRLFYLDRGKLA | |
| | KIILDDIECLSCDIPLSEIYSVFKTRWETTGSFKSLGDFKTYGKADNTA | |
| | FRELITAKEIEKNVQEMSKGSAPGPDGITLGDVVKMDPEFSRTMEIFNL | |
| | WLTTGKIPDMVRGCRTVLIPKSSKPDRLKDINNWRPITIGSILLRLFSR | |
| | IVTARLSKACPLNPRQRGFIRAAGCSENLKLLQTIIWSAKREHRPLGVV | |
| | FVDIAKAFDTVSHQHIIHALQQREVDPHIVGLVSNMYENISTYITTKRN | |
| | THTDKIQIRVGVKQGDPMSPLLFNLAMDPLLCKLEESGKGYHRGQSSIT | |
| | AMAFADDLVLLSDSWENMNTNISILETFCNLTGLKTQGQKCHGFYIKPT | |
| | KDSYTINDCAAWTINGTPLNMIDPGESEKYLGLQFDPWIGIARSGLSTK | |
| | LDFWLQRIDQAPLKPLQKTDILKTYTIPRLIYIADHSEVKTALLETLDQ | |
| | KIRTAVKEWLHLPPCTCDAILYSSTRDGGLGITKLAGLIPSVQARRLHR | |
| | IAQSSDDTMKCFMEKEKMEQLHKKLWIQAGGDRENIPSIWEAPPSSEPP | |
| | NNVSTNSEWEAPTQKDKFPKPCNWRKNEFKKWTKLASQGRGIVNFERDK | |
| | ISNHWIQYYRRIPHRKLLTALQLRANVYPTREFLARGRQDQYIKACRHC | |
| | DADIESCAH11GNCPVTQDARIKRHNYICELLLEEAKKKDWVVFKEPHI | |
| | RDSNKELYKPDLIFVKDARALVVDVTVRYEAAKSSLEEAAAEKVRKYKH | |
| | LETEVRHLTNAKDVTFVGFPLGARGKWHQDNFKLLTELGLSKSRQVKMA | |
| | ETFSTVALFSSVDIVHMFASRARKSMVM | |
| R2Tg with | MASCPKPGPPVSAGAMSLESGLTTHSVLAIERGPNSLANSGSDFGGGGL | 1656 |
| natural linker | GLPLRLLRVSVGTQTSRSDWVDLVSWSHPGPTSKSQQVDLVSLFPKHRV | |
| deletion c- | DLLSKNDQVDLVAQFLPSKFPPNLAENDLALLVNLEFYRSDLHVYECVH | |
| mybB | FAAHWEGLSGLPEVYEQLAPQPCVGETLHSSLPRDSELFVPEEGSSEKE | |
| location - v1 | SEDAPKTSPPTPGKHGLEQTGEEKVMVTVPDKNPPCPCCGTRVNSVLNL | |
| replaced with | IEHLKVSHGKRGVCFRCAKCGKENSNYHSVVCHFPKCRGPETEKAPAGE | |
| XTEN linker | WICEVCNRDFTTKIGLGQHKRLAHPAVRNQERIVASQPKETSNRGAHKR | |
| | CWTKEEEELLIRLEAQFEGNKNINKLIAEHITTKTAKQISDKRRLSGSE | |
| | TPGTSESATPESCFGCLESISQIRTATRDKKDTVTREKHPKKPFQKWMK | |
| | DRAIKKGNYLRFQRLFYLDRGKLAKIILDDIECLSCDIPLSEIYSVFKT | |
| | RWETTGSFKSLGDFKTYGKADNTAFRELITAKEIEKNVQEMSKGSAPGP | |
| | DGITLGDVVKMDPEFSRTMEIFNLWLTTGKIPDMVRGCRTVLIPKSSKP | |
| | DRLKDINNWRPITIGSILLRLFSRIVTARLSKACPLNPRQRGFIRAAGC | |
| | SENLKLLQTIIWSAKREHRPLGVVFVDIAKAFDTVSHQHIIHALQQREV | |
| | DPHIVGLVSNMYENISTYITTKRNTHTDKIQIRVGVKQGDPMSPLLFNL | |
| | AMDPLLCKLEESGKGYHRGQSSITAMAFADDLVLLSDSWENMNTNISIL | |
| | ETFCNLTGLKTQGQKCHGFYIKPTKDSYTINDCAAWTINGTPLNMIDPG | |
| | ESEKYLGLQFDPWIGIARSGLSTKLDFWLQRIDQAPLKPLQKTDILKTY | |
| | TIPRLIYIADHSEVKTALLETLDQKIRTAVKEWLHLPPCTCDAILYSST | |
| | RDGGLGITKLAGLIPSVQARRLHRIAQSSDDTMKCFMEKEKMEQLHKKL | |
| | WIQAGGDRENIPSIWEAPPSSEPPNNVSTNSEWEAPTQKDKFPKPCNWR | |
| | KNEFKKWTKLASQGRGIVNFERDKISNHWIQYYRRIPHRKLLTALQLRA | |
| | NVYPTREFLARGRQDQYIKACRHCDADIESCAH11GNCPVTQDARIKRH | |
| | NYICELLLEEAKKKDWVVFKEPHIRDSNKELYKPDLIFVKDARALVVDV | |
| | TVRYEAAKSSLEEAAAEKVRKYKHLETEVRHLTNAKDVTFVGFPLGARG | |
| | KWHQDNFKLLTELGLSKSRQVKMAETFSTVALFSSVDIVHMFASRARKS | |
| | MVM | |
| R2Tg with | MASCPKPGPPVSAGAMSLESGLTTHSVLAIERGPNSLANSGSDFGGGGL | 1657 |
| natural linker | GLPLRLLRVSVGTQTSRSDWVDLVSWSHPGPTSKSQQVDLVSLFPKHRV | |
| deletion c- | DLLSKNDQVDLVAQFLPSKFPPNLAENDLALLVNLEFYRSDLHVYECVH | |
| mybB | FAAHWEGLSGLPEVYEQLAPQPCVGETLHSSLPRDSELFVPEEGSSEKE | |
| location - v2 | SEDAPKTSPPTPGKHGLEQTGEEKVMVTVPDKNPPCPCCGTRVNSVLNL | |
| replaced with | IEHLKVSHGKRGVCFRCAKCGKENSNYHSVVCHFPKCRGPETEKAPAGE | |
| XTEN linker | WICEVCNRDFTTKIGLGQHKRLAHPAVRNQERIVASQPKETSNRGAHKR | |
| | CWTKEEEELLIRLEAQFEGNKNINKLIAEHITTKTAKQISDKRRLSGSE | |
| | TPGTSESATPESTATRDKKDTVTREKHPKKPFQKWMKDRAIKKGNYLRF | |
| | QRLFYLDRGKLAKIILDDIECLSCDIPLSEIYSVFKTRWETTGSFKSLG | |
| | DFKTYGKADNTAFRELITAKEIEKNVQEMSKGSAPGPDGITLGDVVKMD | |
| | PEFSRTMEIFNLWLTTGKIPDMVRGCRTVLIPKSSKPDRLKDINNWRPI | |
| | TIGSILLRLFSRIVTARLSKACPLNPRQRGFIRAAGCSENLKLLQTIIW | |
| | SAKREHRPLGVVFVDIAKAFDTVSHQHIIHALQQREVDPHIVGLVSNMY | |
| | ENISTYITTKRNTHTDKIQIRVGVKQGDPMSPLLFNLAMDPLLCKLEES | |
| | GKGYHRGQSSITAMAFADDLVLLSDSWENMNTNISILETFCNLTGLKTQ | |
| | GQKCHGFYIKPTKDSYTINDCAAWTINGTPLNMIDPGESEKYLGLQFDP | |
| | WIGIARSGLSTKLDFWLQRIDQAPLKPLQKTDILKTYTIPRLIYIADHS | |
| | EVKTALLETLDQKIRTAVKEWLHLPPCTCDAILYSSTRDGGLGITKLAG | |
| | LIPSVQARRLHRIAQSSDDTMKCFMEKEKMEQLHKKLWIQAGGDRENIP | |
| | SIWEAPPSSEPPNNVSTNSEWEAPTQKDKFPKPCNWRKNEFKKWTKLAS | |
| | QGRGIVNFERDKISNHWIQYYRRIPHRKLLTALQLRANVYPTREFLARG | |
| | RQDQYIKACRHCDADIESCAHIIGNCPVTQDARIKRHNYICELLLEEAK | |
| | KKDWVVFKEPHIRDSNKELYKPDLIFVKDARALVVDVTVRYEAAKSSLE | |
| | EAAAEKVRKYKHLETEVRHLTNAKDVTFVGFPLGARGKWHQDNFKLLTE | |
| | LGLSKSRQVKMAETFSTVALFSSVDIVHMFASRARKSMVM | |

[0659] HEK293T cells were plated in 96-well plates and grown overnight at 37° C., 5% CO₂. The HEK293T cells were transfected with plasmids that expressed R2Tg (wild-type), R2 endonuclease mutant, and natural linker mutants. The transfection was carried out using the Fugene HD transfection reagent according to the manufacturer recommendations, where each well received 80 ng of plasmid DNA and 0.5 μL of transfection reagent. All transfections were performed in duplicate and the cells were incubated for 72 h prior to genomic DNA extraction.

[0660] Activity of the mutants was measured by a ddPCR assay that quantified the copy number of R2Tg integrations by measuring the number of 3′ junction amplicons (FIG. 1b).

[0661] Deletions that begin after the random coil following the c-myb DNA binding motif (location A, c-mybA) are well-tolerated with integration activity near that of wild-type R2Tg. The natural linker region deletion end point is nearly the same for either location vi (N-terminal to the alpha helix preceding the −1 RNA binding motif) or v2 (C-terminal to the alpha helix preceding the −1 RNA binding motif). For the deletion beginning at location A and ending at location v1 or v2, replacement of this polypeptide stretch with the XTEN linker (SEQ ID NO: 1023) seems to retain the most amount of activity whereas replacement with the 3GS linker (SEQ ID NO: 1024) has approximately a 50% reduction in integration activity. For natural linker deletions that begin at location B (c-mybB), these configurations show a more marked reduction in integration activity when compared to wild-type or location A (c-mybA). The difference in activity may be related to the structure of the protein based on the position of the deletion that creates a non-optimal three dimensional structure of the retrotransposase through the location of the linker, length of the linker, or amino acid combination of the linker that is not optimal to connect location B to locations v1 or v2. Even though the N-terminal natural linker deletion start location mybB is a sub-optimal, the C-terminal end of the deletion was most tolerated at v2 with either the 3GS (SEQ ID NO: 1024) or XTEN linker and appears to be the preferential location for having a polypeptide preceding the RBD −1 region.

### Example 2: Determination of Target Specificity of a Gene Writer Endonuclease Domain

[0662] This example describes using a custom genomic landing pad in human cells to determine whether there is a sequence requirement for target cleavage and subsequent integration by a Gene Writer system.

[0663] In this example, cell lines were created to have “landing pads” or stable integrations that mimic a region of rDNA that contain the R2 position to which R2 retrotransposases target for retrotransposition (see FIG. 2). The integrants or landing pads were designed to either have the wild-type region sequence in and around the R2 site found in rDNA, 12-bp of sequence mutation at and around the R2 cleavage site, or 75-bp of sequence mutation at and around the R2 cleavage site (Table E2). The DNA for these different landing pads was chemically synthesized and cloned into the pLenti-N-tGFP vector. The cloned landing pads into the lentiviral expression vector were confirmed and sequence verified by Sanger sequencing of the landing pad. The sequence verified plasmids (9 μg) along with the lentiviral packaging mix (9 μg, obtained from Biosettia) were transfected using Lipofectamine2000™ according the manufacturer instructions into a packaging cell line, LentiX-293T (Takara Bio). The transfected cells were incubated at 37° C., 10% CO₂ for 48 hours (including one medium change at 24 hrs) and the viral particle containing medium was collected from the cell culture dish. The collected medium was filtered through a 0.2 μm filter to remove cell debris and prepared for transduction of U2OS cells. The viral containing medium was diluted in DMEM and mixed with polybrene to prepare a dilution series for transduction of U2OS cells where the final concentration of polybrene was 8 μg/ml. The U2OS cells were grown in viral containing medium for 48 hour and then split with fresh medium. The split cells were grown to confluence and transduction efficiency of the different dilutions of virus were measured by GFP expression via flow cytometry and ddPCR detection of the genomic integrated lentivirus that contained GFP and the different rDNA landing pads (WT, 12-bp mutation, or 75-bp mutation). The GFP positive cell line from the 1:10 viral medium dilution (>99% GFP+) was chosen for subsequent experiments and cryopreserved.

[0664] To test if mutations in and around the R2 cleavage position can impact the Gene Writer system activity, the R2Tg Gene Writer Driver along with a plasmid that expressed a Gene Writer transgene molecule were electroporated into the different landing pad cell lines. In order to test if the sequence in and around the cleavage site impacted the Gene Writer polypeptide sequence activity to integrate, the homology arms for the Gene Writer template molecule were designed to have 100% homology 100 bp to the left (Gene Writer molecule module A) and 100 bp to the right (Gene Writer molecule module F) of the cleavage position for each of the landing pads. The changes to the homology arms of the Gene Writer template molecule expression plasmid were introduced by PCR and were confirmed by Sanger Sequencing. Either 73 ng of the WT R2Tg Gene Writer Driver or the Endonuclease domain mutant R2Tg Gene Writer Driver expression plasmids were co-nucleofected) using nucleofection program DN100 into each of the different U2OS landing pad cell lines (WT, 12-bp mutant, or 75-bp mutant) with 177 ng of plasmids that expressed the Gene Writer template molecules that had 100% homology to either the WT landing pad, 12-bp mutant landing pad, or 75-bp mutant landing pad. After nucleofection, cells were grown at 37° C., 10% CO₂ for 3 days prior to cell lysis and genomic DNA extraction. The extracted gDNA was measured for Gene Writer template molecule integration at the landing pad site by ddPCR. The DNA nicking activity was measured by detection of insertions, deletions, and/or a combination of both insertions and deletions at the landing pad through next-generation sequence analysis of an amplicon that was generated from the landing pad found in the gDNA.

[0665] The integration activity of the R2Tg Gene Writer is greatly reduced when the cleavage region is mutated where there is no integration of a Gene Writer template molecule in either of the 12-bp or 75-bp landing pad cell lines (FIG. 3a). Furthermore, integration is not detected with Gene Writer template molecules that have homology arms that correspond to either the 12-bp or 75-bp mutant landing pads. To rule out that the lost integration activity is due to incompatible homology arms, DNA nicking activity was measured by NGS analysis of the landing pad. The nicking activity is independent of the Gene Writer template molecule as the WT R2Tg Gene Writer driver had comparable indels at the WT landing pad with the WT, 12-bp mutant, or 75-bp mutant Gene Writer template molecule (FIG. 3b). The 12-bp and 75-bp landing pads, regardless of Gene Writer template molecule co-nucleofected with the WT R2Tg Gene Writer did not show any reads above background that contained indels. The level of indels was similar to the Gene Writer template driver containing endonuclease mutations.

TABLE E2
Landing Pad Information

| | Sequence 5′-> 3′ |
|---|---|
| Landing Pad | (rDNA, underline; cleavage region, |
| Sequence Name | bold; mutated sequence, bold-italic |
| WT | GCTCACACAGGAAACAGCTATGACCATGATTACGCCAAGCTGTTGACG |
| | CGATGTGATTTCTGCCCAGTGCTCTGAATGTCAAAGTGAAGAAATTCA |
| | ATGAAGCGCGGGTAAACGGCGGGAGTAACTATGACTCTCTTAAGGTAG |
| | CCAAATGCCTCGTCATCTAATTAGTGACGCGCATGAATGGATGAACGA |
| | GATTCCCACTGTCCCTACCTACTATCCAGCGAAACCACAGCCAAGGGA |
| | AATTCACTGGCCGTCGTTTTACAACGTCGTGACTGGGAAAACCCTGGC |
| | GTTACCCAACTTAATCGCCTTGCAGCACATCC (SEQ ID NO: |
| | 1658) |
| 12-bp Mutant | GCTCACACAGGAAACAGCTATGACCATGATTACGCCAAGCTGTTGACG |
| | CGATGTGATTTCTGCCCAGTGCTCTGAATGTCAAAGTGAAGAAATTCA |
| | ATGAAGCGCGGGTAAACGGCGGGAGTAACTATGACTCTCTT [symbol] |
| | [symbol] TGCCTCGTCATCTAATTAGTGACGCGCATGAATGGATGAACGA |
| | GATTCCCACTGTCCCTACCTACTATCCAGCGAAACCACAGCCAAGGGA |
| | AATTCACTGGCCGTCGTTTTACAACGTCGTGACTGGGAAAACCCTGGC |
| | GTTACCCAACTTAATCGCCTTGCAGCACATCC (SEQ ID NO: |
| | 1659) |
| 75-bp Mutant | Gctcacacaggaaacagctatgaccatgattacgccaagctgttgacg |
| | cgatgtgatttctgcccagtgctctgaatgtcaaagtgaagaaattca |
| | atgaagcgcgggtaaacggcgggagtaactatgactctcttt [symbol] |
| | [symbol] [symbol] [symbol] |
| | [symbol] [symbol] actatccagcgaaaccacagccaaggga |
| | aattcactggccgtcgttttacaacgtcgtgactgggaaaaccctggc |
| | gttacccaacttaatcgccttgcagcacatcc (SEQ ID NO: |
| | 1660) |

[0666] In some embodiments, a Gene Writer is derived from a retrotransposase with some level of target sequence specificity in the endonuclease domain. Thus, it may be desirable to retarget the Gene Writer to a location in the genome that possesses homology to the natural target sequence recognized by an endonuclease domain, referred to as the endonuclease recognition motif (ERM). In some embodiments, this sub-target sequence may be contained in the region surrounding the nick site. In specific embodiments, a 13 nt sequence (TAAGGTAGCCAAA) (SEQ ID NO: 1661) based on the nick site of an R2 element, e.g., R2Tg, is used to search the human genome for suitable locations for retargeting the Gene Writer, wherein a heterologous DNA-binding domain is designed to localize the Gene Writer to an endogenous ERM to direct endonuclease activity and subsequent retrotransposition of a template RNA. In some embodiments, the human genome site possesses 10000 identity to at least 1, 2, 3, 4, 5, 6, 7, 8, 9, 10, 11, 12, or 13 nucleotides in the 13 nt motif. In further embodiments, the human genome site containing the ERM is selected from Table E3, and a DNA-binding domain fusion, e.g., ZF, TAL, or dCas9 with a custom gRNA, is designed to localize the polypeptide to the site (e.g., see Example 3). In preferred embodiments, the genome site possesses a safe harbor score of at least 5, 6, 7, 8 as defined in Pellenz et al Hum Gene Ther 30, 814-282 (2019) and shown in Table E3. In some embodiments, the template RNA (or DNA encoding the template RNA) is designed such that the homology arms match the flanking genomic sequences surrounding the expected nick site at the new target.

TABLE E3
Human genome sites matching a 13 nt stretch around the nicking site of
R2 elements. The human genome was searched for 100% identity to the
full 13 nt match or 12 consecutive nucleotides (“Match”). Chromosomal
location and start and end coordinates are provided for each match.
Score (“Score”) is a metric evaluating each site for eight desirable safe
harbor characteristics.

| Chromo- | | | | | |
|---|---|---|---|---|---|
| some | Start | End | Source | Match | Score |
| chr06 | 123749082 | 123749094 | NC_000006.12 | 13 | 8 |
| chr02 | 5035294 | 5035305 | NC_000002.12 | 12 | 8 |
| chr02 | 145760352 | 145760341 | NC_000002.12 | 12 | 8 |
| chr02 | 147034635 | 147034624 | NC_000002.12 | 12 | 8 |
| chr02 | 181792104 | 181792115 | NC_000002.12 | 12 | 8 |
| chr03 | 34017171 | 34017182 | NC_000003.12 | 12 | 8 |
| chr03 | 74784684 | 74784695 | NC_000003.12 | 12 | 8 |
| chr03 | 110093351 | 110093362 | NC_000003.12 | 12 | 8 |
| chr06 | 14459104 | 14459093 | NC_000006.12 | 12 | 8 |
| chr06 | 119620936 | 119620947 | NC_000006.12 | 12 | 8 |
| chr06 | 145123473 | 145123462 | NC_000006.12 | 12 | 8 |
| chr07 | 12024654 | 12024665 | NC_000007.14 | 12 | 8 |
| chr07 | 52001436 | 52001447 | NC_000007.14 | 12 | 8 |
| chr07 | 115339421 | 115339410 | NC_000007.14 | 12 | 8 |
| chr08 | 126384299 | 126384310 | NC_000008.11 | 12 | 8 |
| chr12 | 84083562 | 84083573 | NC_000012.12 | 12 | 8 |
| chrX | 117646432 | 117646421 | NC_000023.11 | 12 | 8 |
| chr02 | 106547509 | 106547521 | NC_000002.12 | 13 | 7 |
| chr02 | 226038592 | 226038604 | NC_000002.12 | 13 | 7 |
| chr03 | 102522532 | 102522520 | NC_000003.12 | 13 | 7 |
| chr03 | 110933592 | 110933604 | NC_000003.12 | 13 | 7 |
| chr03 | 119752575 | 119752563 | NC_000003.12 | 13 | 7 |
| chr03 | 172868603 | 172868615 | NC_000003.12 | 13 | 7 |
| chr03 | 191985222 | 191985210 | NC_000003.12 | 13 | 7 |
| chr05 | 6213503 | 6213515 | NC_000005.10 | 13 | 7 |
| chr05 | 58295578 | 58295566 | NC_000005.10 | 13 | 7 |
| chr05 | 129844500 | 129844512 | NC_000005.10 | 13 | 7 |
| chr06 | 1454372 | 1454360 | NC_000006.12 | 13 | 7 |
| chr06 | 48973921 | 48973909 | NC_000006.12 | 13 | 7 |
| chr08 | 18663054 | 18663066 | NC_000008.11 | 13 | 7 |
| chr08 | 93499020 | 93499032 | NC_000008.11 | 13 | 7 |
| chr08 | 119753973 | 119753985 | NC_000008.11 | 13 | 7 |
| chr09 | 86856907 | 86856919 | NC_000009.12 | 13 | 7 |
| chr12 | 29955571 | 29955583 | NC_000012.12 | 13 | 7 |
| chr12 | 118529104 | 118529092 | NC_000012.12 | 13 | 7 |
| chr13 | 65656029 | 65656041 | NC_000013.11 | 13 | 7 |
| chr22 | 34266611 | 34266623 | NC_000022.11 | 13 | 7 |
| chrX | 26651640 | 26651628 | NC_000023.11 | 13 | 7 |
| chrX | 119194351 | 119194363 | NC_000023.11 | 13 | 7 |
| chrX | 139180620 | 139180608 | NC_000023.11 | 13 | 7 |
| chr01 | 106465846 | 106465857 | NC_000001.11 | 12 | 7 |
| chr02 | 964160 | 964171 | NC_000002.12 | 12 | 7 |
| chr02 | 40018947 | 40018936 | NC_000002.12 | 12 | 7 |
| chr02 | 62845403 | 62845392 | NC_000002.12 | 12 | 7 |
| chr02 | 64834920 | 64834909 | NC_000002.12 | 12 | 7 |
| chr02 | 67969608 | 67969619 | NC_000002.12 | 12 | 7 |
| chr02 | 76183118 | 76183129 | NC_000002.12 | 12 | 7 |
| chr02 | 81819286 | 81819297 | NC_000002.12 | 12 | 7 |
| chr02 | 119597238 | 119597249 | NC_000002.12 | 12 | 7 |
| chr02 | 122897376 | 122897365 | NC_000002.12 | 12 | 7 |
| chr02 | 123603423 | 123603412 | NC_000002.12 | 12 | 7 |
| chr02 | 144644206 | 144644217 | NC_000002.12 | 12 | 7 |
| chr02 | 145221757 | 145221746 | NC_000002.12 | 12 | 7 |
| chr02 | 158367531 | 158367520 | NC_000002.12 | 12 | 7 |
| chr02 | 160092083 | 160092072 | NC_000002.12 | 12 | 7 |
| chr02 | 192245037 | 192245048 | NC_000002.12 | 12 | 7 |
| chr02 | 195223552 | 195223563 | NC_000002.12 | 12 | 7 |
| chr02 | 200351999 | 200351988 | NC_000002.12 | 12 | 7 |
| chr02 | 237068525 | 237068514 | NC_000002.12 | 12 | 7 |
| chr03 | 18724351 | 18724340 | NC_000003.12 | 12 | 7 |
| chr03 | 23969399 | 23969388 | NC_000003.12 | 12 | 7 |
| chr03 | 25177339 | 25177350 | NC_000003.12 | 12 | 7 |
| chr03 | 34880863 | 34880852 | NC_000003.12 | 12 | 7 |
| chr03 | 66233879 | 66233890 | NC_000003.12 | 12 | 7 |
| chr03 | 74527939 | 74527950 | NC_000003.12 | 12 | 7 |
| chr03 | 98583025 | 98583014 | NC_000003.12 | 12 | 7 |
| chr03 | 99278452 | 99278463 | NC_000003.12 | 12 | 7 |
| chr03 | 116060228 | 116060239 | NC_000003.12 | 12 | 7 |
| chr03 | 139468578 | 139468589 | NC_000003.12 | 12 | 7 |
| chr03 | 140064054 | 140064043 | NC_000003.12 | 12 | 7 |
| chr03 | 140438138 | 140438127 | NC_000003.12 | 12 | 7 |
| chr03 | 152457330 | 152457341 | NC_000003.12 | 12 | 7 |
| chr03 | 160950736 | 160950725 | NC_000003.12 | 12 | 7 |
| chr03 | 167207758 | 167207769 | NC_000003.12 | 12 | 7 |
| chr03 | 167722472 | 167722483 | NC_000003.12 | 12 | 7 |
| chr03 | 180475661 | 180475672 | NC_000003.12 | 12 | 7 |
| chr04 | 121590786 | 121590775 | NC_000004.12 | 12 | 7 |
| chr04 | 133719599 | 133719588 | NC_000004.12 | 12 | 7 |
| chr05 | 11564132 | 11564121 | NC_000005.10 | 12 | 7 |
| chr05 | 11970221 | 11970210 | NC_000005.10 | 12 | 7 |
| chr05 | 32814431 | 32814420 | NC_000005.10 | 12 | 7 |
| chr05 | 38003029 | 38003018 | NC_000005.10 | 12 | 7 |
| chr05 | 39758118 | 39758129 | NC_000005.10 | 12 | 7 |
| chr05 | 41221615 | 41221604 | NC_000005.10 | 12 | 7 |
| chr05 | 74838717 | 74838728 | NC_000005.10 | 12 | 7 |
| chr05 | 86444529 | 86444518 | NC_000005.10 | 12 | 7 |
| chr05 | 86617117 | 86617106 | NC_000005.10 | 12 | 7 |
| chr05 | 89438360 | 89438349 | NC_000005.10 | 12 | 7 |
| chr05 | 108102395 | 108102406 | NC_000005.10 | 12 | 7 |
| chr05 | 110231750 | 110231761 | NC_000005.10 | 12 | 7 |
| chr05 | 113996496 | 113996485 | NC_000005.10 | 12 | 7 |
| chr05 | 117233050 | 117233039 | NC_000005.10 | 12 | 7 |
| chr05 | 121622921 | 121622932 | NC_000005.10 | 12 | 7 |
| chr05 | 122520704 | 122520693 | NC_000005.10 | 12 | 7 |
| chr05 | 142330490 | 142330479 | NC_000005.10 | 12 | 7 |
| chr05 | 156359105 | 156359094 | NC_000005.10 | 12 | 7 |
| chr06 | 19187842 | 19187831 | NC_000006.12 | 12 | 7 |
| chr06 | 41103469 | 41103458 | NC_000006.12 | 12 | 7 |
| chr06 | 49856872 | 49856883 | NC_000006.12 | 12 | 7 |
| chr06 | 54896309 | 54896298 | NC_000006.12 | 12 | 7 |
| chr06 | 64416107 | 64416096 | NC_000006.12 | 12 | 7 |
| chr06 | 104438997 | 104439008 | NC_000006.12 | 12 | 7 |
| chr06 | 109349688 | 109349677 | NC_000006.12 | 12 | 7 |
| chr06 | 110631149 | 110631160 | NC_000006.12 | 12 | 7 |
| chr06 | 114751383 | 114751372 | NC_000006.12 | 12 | 7 |
| chr06 | 116514339 | 116514350 | NC_000006.12 | 12 | 7 |
| chr06 | 121606126 | 121606137 | NC_000006.12 | 12 | 7 |
| chr06 | 126139788 | 126139777 | NC_000006.12 | 12 | 7 |
| chr06 | 130852449 | 130852460 | NC_000006.12 | 12 | 7 |
| chr06 | 136843057 | 136843068 | NC_000006.12 | 12 | 7 |
| chr06 | 155559692 | 155559681 | NC_000006.12 | 12 | 7 |
| chr06 | 158099232 | 158099221 | NC_000006.12 | 12 | 7 |
| chr07 | 24339208 | 24339219 | NC_000007.14 | 12 | 7 |
| chr07 | 39519736 | 39519725 | NC_000007.14 | 12 | 7 |
| chr07 | 72228733 | 72228722 | NC_000007.14 | 12 | 7 |
| chr07 | 82955239 | 82955228 | NC_000007.14 | 12 | 7 |
| chr07 | 104990180 | 104990191 | NC_000007.14 | 12 | 7 |
| chr07 | 107698186 | 107698197 | NC_000007.14 | 12 | 7 |
| chr07 | 111002449 | 111002438 | NC_000007.14 | 12 | 7 |
| chr07 | 115191852 | 115191841 | NC_000007.14 | 12 | 7 |
| chr07 | 115572755 | 115572766 | NC_000007.14 | 12 | 7 |
| chr08 | 21126162 | 21126151 | NC_000008.11 | 12 | 7 |
| chr08 | 25928055 | 25928066 | NC_000008.11 | 12 | 7 |
| chr08 | 45036535 | 45036524 | NC_000008.11 | 12 | 7 |
| chr08 | 45248484 | 45248473 | NC_000008.11 | 12 | 7 |
| chr08 | 45502096 | 45502085 | NC_000008.11 | 12 | 7 |
| chr08 | 45763984 | 45763973 | NC_000008.11 | 12 | 7 |
| chr08 | 53335054 | 53335043 | NC_000008.11 | 12 | 7 |
| chr08 | 55581238 | 55581227 | NC_000008.11 | 12 | 7 |
| chr08 | 63169546 | 63169557 | NC_000008.11 | 12 | 7 |
| chr08 | 66553887 | 66553898 | NC_000008.11 | 12 | 7 |
| chr08 | 86283378 | 86283367 | NC_000008.11 | 12 | 7 |
| chr08 | 113060704 | 113060715 | NC_000008.11 | 12 | 7 |
| chr08 | 114537195 | 114537206 | NC_000008.11 | 12 | 7 |
| chr08 | 114886082 | 114886071 | NC_000008.11 | 12 | 7 |
| chr08 | 127206415 | 127206426 | NC_000008.11 | 12 | 7 |
| chr08 | 133590421 | 133590410 | NC_000008.11 | 12 | 7 |
| chr08 | 135425161 | 135425150 | NC_000008.11 | 12 | 7 |
| chr10 | 7034863 | 7034852 | NC_000010.11 | 12 | 7 |
| chr10 | 124304797 | 124304786 | NC_000010.11 | 12 | 7 |
| chr10 | 131502495 | 131502506 | NC_000010.11 | 12 | 7 |
| chr11 | 5557203 | 5557192 | NC_000011.10 | 12 | 7 |
| chr11 | 31242576 | 31242565 | NC_000011.10 | 12 | 7 |
| chr11 | 31419537 | 31419526 | NC_000011.10 | 12 | 7 |
| chr11 | 33169689 | 33169678 | NC_000011.10 | 12 | 7 |
| chr11 | 55948947 | 55948958 | NC_000011.10 | 12 | 7 |
| chr11 | 85654901 | 85654890 | NC_000011.10 | 12 | 7 |
| chr11 | 92588724 | 92588735 | NC_000011.10 | 12 | 7 |
| chr11 | 105227927 | 105227938 | NC_000011.10 | 12 | 7 |
| chr11 | 106302916 | 106302927 | NC_000011.10 | 12 | 7 |
| chr11 | 110594096 | 110594085 | NC_000011.10 | 12 | 7 |
| chr11 | 125228337 | 125228326 | NC_000011.10 | 12 | 7 |
| chr12 | 8769205 | 8769194 | NC_000012.12 | 12 | 7 |
| chr12 | 30438984 | 30438973 | NC_000012.12 | 12 | 7 |
| chr12 | 33556205 | 33556216 | NC_000012.12 | 12 | 7 |
| chr12 | 39419629 | 39419640 | NC_000012.12 | 12 | 7 |
| chr12 | 88509246 | 88509257 | NC_000012.12 | 12 | 7 |
| chr12 | 92878719 | 92878708 | NC_000012.12 | 12 | 7 |
| chr12 | 107034133 | 107034144 | NC_000012.12 | 12 | 7 |
| chr12 | 109455187 | 109455176 | NC_000012.12 | 12 | 7 |
| chr13 | 88827671 | 88827660 | NC_000013.11 | 12 | 7 |
| chr14 | 48126959 | 48126948 | NC_000014.9 | 12 | 7 |
| chr20 | 851155 | 851166 | NC_000020.11 | 12 | 7 |
| chr22 | 17367227 | 17367238 | NC_000022.11 | 12 | 7 |
| chrX | 20420571 | 20420582 | NC_000023.11 | 12 | 7 |
| chrX | 22545830 | 22545819 | NC_000023.11 | 12 | 7 |
| chrX | 28899719 | 28899708 | NC_000023.11 | 12 | 7 |
| chrX | 33013952 | 33013963 | NC_000023.11 | 12 | 7 |
| chrX | 103880419 | 103880408 | NC_000023.11 | 12 | 7 |
| chrX | 105612448 | 105612459 | NC_000023.11 | 12 | 7 |
| chrX | 107929443 | 107929454 | NC_000023.11 | 12 | 7 |
| chrX | 112571297 | 112571286 | NC_000023.11 | 12 | 7 |
| chrX | 127584278 | 127584267 | NC_000023.11 | 12 | 7 |
| chrX | 130836800 | 130836811 | NC_000023.11 | 12 | 7 |
| chrX | 140554200 | 140554211 | NC_000023.11 | 12 | 7 |
| chrX | 146697583 | 146697572 | NC_000023.11 | 12 | 7 |
| chr01 | 97461481 | 97461469 | NC_000001.11 | 13 | 6 |
| chr01 | 104600535 | 104600547 | NC_000001.11 | 13 | 6 |
| chr02 | 12589473 | 12589461 | NC_000002.12 | 13 | 6 |
| chr02 | 187173643 | 187173631 | NC_000002.12 | 13 | 6 |
| chr03 | 29181713 | 29181701 | NC_000003.12 | 13 | 6 |
| chr04 | 32171549 | 32171537 | NC_000004.12 | 13 | 6 |
| chr04 | 116646904 | 116646916 | NC_000004.12 | 13 | 6 |
| chr04 | 164205821 | 164205833 | NC_000004.12 | 13 | 6 |
| chr04 | 170244792 | 170244780 | NC_000004.12 | 13 | 6 |
| chr05 | 15818439 | 15818451 | NC_000005.10 | 13 | 6 |
| chr05 | 174059501 | 174059489 | NC_000005.10 | 13 | 6 |
| chr06 | 94936128 | 94936140 | NC_000006.12 | 13 | 6 |
| chr06 | 98142018 | 98142006 | NC_000006.12 | 13 | 6 |
| chr06 | 151814731 | 151814719 | NC_000006.12 | 13 | 6 |
| chr07 | 14490189 | 14490201 | NC_000007.14 | 13 | 6 |
| chr07 | 53075165 | 53075153 | NC_000007.14 | 13 | 6 |
| chr07 | 87815318 | 87815306 | NC_000007.14 | 13 | 6 |
| chr07 | 103485572 | 103485584 | NC_000007.14 | 13 | 6 |
| chr08 | 35951572 | 35951560 | NC_000008.11 | 13 | 6 |
| chr08 | 39327231 | 39327219 | NC_000008.11 | 13 | 6 |
| chr08 | 69690270 | 69690258 | NC_000008.11 | 13 | 6 |
| chr08 | 117816166 | 117816154 | NC_000008.11 | 13 | 6 |
| chr08 | 123134654 | 123134666 | NC_000008.11 | 13 | 6 |
| chr09 | 68817454 | 68817466 | NC_000009.12 | 13 | 6 |
| chr09 | 68894040 | 68894028 | NC_000009.12 | 13 | 6 |
| chr09 | 80470190 | 80470178 | NC_000009.12 | 13 | 6 |
| chr10 | 1642234 | 1642222 | NC_000010.11 | 13 | 6 |
| chr10 | 73077072 | 73077060 | NC_000010.11 | 13 | 6 |
| chr10 | 110134589 | 110134601 | NC_000010.11 | 13 | 6 |
| chr11 | 9150979 | 9150991 | NC_000011.10 | 13 | 6 |
| chr11 | 9153635 | 9153623 | NC_000011.10 | 13 | 6 |
| chr11 | 13413693 | 13413705 | NC_000011.10 | 13 | 6 |
| chr11 | 41773900 | 41773912 | NC_000011.10 | 13 | 6 |
| chr11 | 77886545 | 77886557 | NC_000011.10 | 13 | 6 |
| chr11 | 79988166 | 79988154 | NC_000011.10 | 13 | 6 |
| chr11 | 108008162 | 108008150 | NC_000011.10 | 13 | 6 |
| chr12 | 30847723 | 30847735 | NC_000012.12 | 13 | 6 |
| chr12 | 86693014 | 86693026 | NC_000012.12 | 13 | 6 |
| chr12 | 122128926 | 122128914 | NC_000012.12 | 13 | 6 |
| chr13 | 29622714 | 29622726 | NC_000013.11 | 13 | 6 |
| chr14 | 39336522 | 39336510 | NC_000014.9 | 13 | 6 |
| chr15 | 94819443 | 94819431 | NC_000015.10 | 13 | 6 |
| chr17 | 10951262 | 10951250 | NC_000017.11 | 13 | 6 |
| chr19 | 30854506 | 30854518 | NC_000019.10 | 13 | 6 |
| chr20 | 42688485 | 42688473 | NC_000020.11 | 13 | 6 |
| chrX | 38138789 | 38138801 | NC_000023.11 | 13 | 6 |
| chrX | 86361231 | 86361243 | NC_000023.11 | 13 | 6 |
| chrX | 107051786 | 107051798 | NC_000023.11 | 13 | 6 |
| chrX | 109054235 | 109054247 | NC_000023.11 | 13 | 6 |
| chr01 | 32830533 | 32830522 | NC_000001.11 | 12 | 6 |
| chr01 | 56714138 | 56714127 | NC_000001.11 | 12 | 6 |
| chr01 | 79950536 | 79950547 | NC_000001.11 | 12 | 6 |
| chr01 | 81600862 | 81600851 | NC_000001.11 | 12 | 6 |
| chr01 | 88351333 | 88351344 | NC_000001.11 | 12 | 6 |
| chr01 | 100720346 | 100720335 | NC_000001.11 | 12 | 6 |
| chr01 | 103153587 | 103153598 | NC_000001.11 | 12 | 6 |
| chr01 | 163679268 | 163679279 | NC_000001.11 | 12 | 6 |
| chr01 | 178138239 | 178138228 | NC_000001.11 | 12 | 6 |
| chr01 | 202443386 | 202443375 | NC_000001.11 | 12 | 6 |
| chr01 | 214381798 | 214381787 | NC_000001.11 | 12 | 6 |
| chr01 | 239483920 | 239483909 | NC_000001.11 | 12 | 6 |
| chr02 | 5995932 | 5995921 | NC_000002.12 | 12 | 6 |
| chr02 | 14869774 | 14869785 | NC_000002.12 | 12 | 6 |
| chr02 | 37466261 | 37466250 | NC_000002.12 | 12 | 6 |
| chr02 | 38845623 | 38845634 | NC_000002.12 | 12 | 6 |
| chr02 | 38849877 | 38849866 | NC_000002.12 | 12 | 6 |
| chr02 | 52660534 | 52660523 | NC_000002.12 | 12 | 6 |
| chr02 | 55372861 | 55372872 | NC_000002.12 | 12 | 6 |
| chr02 | 62005199 | 62005210 | NC_000002.12 | 12 | 6 |
| chr02 | 70287567 | 70287556 | NC_000002.12 | 12 | 6 |
| chr02 | 79359701 | 79359712 | NC_000002.12 | 12 | 6 |
| chr02 | 84655638 | 84655627 | NC_000002.12 | 12 | 6 |
| chr02 | 126324776 | 126324787 | NC_000002.12 | 12 | 6 |
| chr02 | 149537132 | 149537143 | NC_000002.12 | 12 | 6 |
| chr02 | 169529510 | 169529521 | NC_000002.12 | 12 | 6 |
| chr02 | 175817135 | 175817124 | NC_000002.12 | 12 | 6 |
| chr02 | 180079693 | 180079682 | NC_000002.12 | 12 | 6 |
| chr02 | 206324011 | 206324000 | NC_000002.12 | 12 | 6 |
| chr02 | 206814054 | 206814043 | NC_000002.12 | 12 | 6 |
| chr02 | 224807794 | 224807805 | NC_000002.12 | 12 | 6 |
| chr02 | 229238864 | 229238853 | NC_000002.12 | 12 | 6 |
| chr02 | 236280053 | 236280064 | NC_000002.12 | 12 | 6 |
| chr03 | 154343 | 154354 | NC_000003.12 | 12 | 6 |
| chr03 | 8511973 | 8511984 | NC_000003.12 | 12 | 6 |
| chr03 | 16880365 | 16880376 | NC_000003.12 | 12 | 6 |
| chr03 | 18087857 | 18087846 | NC_000003.12 | 12 | 6 |
| chr03 | 47168148 | 47168137 | NC_000003.12 | 12 | 6 |
| chr03 | 47937628 | 47937617 | NC_000003.12 | 12 | 6 |
| chr03 | 48992978 | 48992989 | NC_000003.12 | 12 | 6 |
| chr03 | 82163078 | 82163067 | NC_000003.12 | 12 | 6 |
| chr03 | 103449909 | 103449898 | NC_000003.12 | 12 | 6 |
| chr03 | 120049593 | 120049604 | NC_000003.12 | 12 | 6 |
| chr03 | 143783076 | 143783065 | NC_000003.12 | 12 | 6 |
| chr03 | 149601763 | 149601752 | NC_000003.12 | 12 | 6 |
| chr03 | 167891194 | 167891183 | NC_000003.12 | 12 | 6 |
| chr03 | 181054638 | 181054627 | NC_000003.12 | 12 | 6 |
| chr03 | 191545181 | 191545170 | NC_000003.12 | 12 | 6 |
| chr03 | 197899144 | 197899155 | NC_000003.12 | 12 | 6 |
| chr04 | 668375 | 668364 | NC_000004.12 | 12 | 6 |
| chr04 | 19382020 | 19382031 | NC_000004.12 | 12 | 6 |
| chr04 | 19484541 | 19484552 | NC_000004.12 | 12 | 6 |
| chr04 | 26997338 | 26997349 | NC_000004.12 | 12 | 6 |
| chr04 | 55658608 | 55658619 | NC_000004.12 | 12 | 6 |
| chr04 | 70437852 | 70437841 | NC_000004.12 | 12 | 6 |
| chr04 | 79981798 | 79981809 | NC_000004.12 | 12 | 6 |
| chr04 | 94968197 | 94968208 | NC_000004.12 | 12 | 6 |
| chr04 | 102674459 | 102674470 | NC_000004.12 | 12 | 6 |
| chr04 | 124485434 | 124485445 | NC_000004.12 | 12 | 6 |
| chr04 | 126123159 | 126123148 | NC_000004.12 | 12 | 6 |
| chr04 | 137124764 | 137124753 | NC_000004.12 | 12 | 6 |
| chr04 | 160702860 | 160702849 | NC_000004.12 | 12 | 6 |
| chr04 | 167052375 | 167052386 | NC_000004.12 | 12 | 6 |
| chr04 | 179139043 | 179139032 | NC_000004.12 | 12 | 6 |
| chr04 | 179161408 | 179161397 | NC_000004.12 | 12 | 6 |
| chr04 | 187143772 | 187143761 | NC_000004.12 | 12 | 6 |
| chr05 | 10200709 | 10200720 | NC_000005.10 | 12 | 6 |
| chr05 | 33225853 | 33225842 | NC_000005.10 | 12 | 6 |
| chr05 | 76255175 | 76255186 | NC_000005.10 | 12 | 6 |
| chr05 | 82855245 | 82855256 | NC_000005.10 | 12 | 6 |
| chr05 | 84139572 | 84139561 | NC_000005.10 | 12 | 6 |
| chr05 | 88198462 | 88198473 | NC_000005.10 | 12 | 6 |
| chr05 | 102501084 | 102501073 | NC_000005.10 | 12 | 6 |
| chr05 | 109583817 | 109583806 | NC_000005.10 | 12 | 6 |
| chr05 | 128180682 | 128180671 | NC_000005.10 | 12 | 6 |
| chr05 | 136190403 | 136190392 | NC_000005.10 | 12 | 6 |
| chr05 | 154189555 | 154189566 | NC_000005.10 | 12 | 6 |
| chr05 | 171957271 | 171957282 | NC_000005.10 | 12 | 6 |
| chr05 | 175317578 | 175317567 | NC_000005.10 | 12 | 6 |
| chr06 | 4853151 | 4853162 | NC_000006.12 | 12 | 6 |
| chr06 | 16133021 | 16133032 | NC_000006.12 | 12 | 6 |
| chr06 | 26103447 | 26103436 | NC_000006.12 | 12 | 6 |
| chr06 | 35947570 | 35947581 | NC_000006.12 | 12 | 6 |
| chr06 | 68279419 | 68279430 | NC_000006.12 | 12 | 6 |
| chr06 | 79806546 | 79806557 | NC_000006.12 | 12 | 6 |
| chr06 | 85260407 | 85260418 | NC_000006.12 | 12 | 6 |
| chr06 | 136633874 | 136633885 | NC_000006.12 | 12 | 6 |
| chr06 | 137931054 | 137931043 | NC_000006.12 | 12 | 6 |
| chr06 | 139739984 | 139739973 | NC_000006.12 | 12 | 6 |
| chr06 | 140341418 | 140341429 | NC_000006.12 | 12 | 6 |
| chr06 | 145869806 | 145869795 | NC_000006.12 | 12 | 6 |
| chr06 | 146731539 | 146731528 | NC_000006.12 | 12 | 6 |
| chr06 | 168728425 | 168728436 | NC_000006.12 | 12 | 6 |
| chr07 | 51771646 | 51771635 | NC_000007.14 | 12 | 6 |
| chr07 | 137082304 | 137082315 | NC_000007.14 | 12 | 6 |
| chr07 | 141052267 | 141052278 | NC_000007.14 | 12 | 6 |
| chr08 | 17556548 | 17556537 | NC_000008.11 | 12 | 6 |
| chr08 | 30097319 | 30097308 | NC_000008.11 | 12 | 6 |
| chr08 | 68502659 | 68502670 | NC_000008.11 | 12 | 6 |
| chr08 | 86697209 | 86697198 | NC_000008.11 | 12 | 6 |
| chr08 | 91622182 | 91622171 | NC_000008.11 | 12 | 6 |
| chr08 | 92498179 | 92498168 | NC_000008.11 | 12 | 6 |
| chr08 | 124481608 | 124481597 | NC_000008.11 | 12 | 6 |
| chr08 | 129563081 | 129563092 | NC_000008.11 | 12 | 6 |
| chr08 | 131305462 | 131305451 | NC_000008.11 | 12 | 6 |
| chr09 | 14627274 | 14627285 | NC_000009.12 | 12 | 6 |
| chr09 | 15151836 | 15151847 | NC_000009.12 | 12 | 6 |
| chr09 | 22322306 | 22322295 | NC_000009.12 | 12 | 6 |
| chr09 | 23783142 | 23783153 | NC_000009.12 | 12 | 6 |
| chr09 | 26318093 | 26318104 | NC_000009.12 | 12 | 6 |
| chr09 | 31054959 | 31054970 | NC_000009.12 | 12 | 6 |
| chr09 | 79007585 | 79007596 | NC_000009.12 | 12 | 6 |
| chr09 | 88239264 | 88239253 | NC_000009.12 | 12 | 6 |
| chr09 | 96543680 | 96543669 | NC_000009.12 | 12 | 6 |
| chr09 | 99112802 | 99112813 | NC_000009.12 | 12 | 6 |
| chr09 | 123836553 | 123836564 | NC_000009.12 | 12 | 6 |
| chr10 | 33633573 | 33633562 | NC_000010.11 | 12 | 6 |
| chr10 | 65551995 | 65551984 | NC_000010.11 | 12 | 6 |
| chr10 | 66717930 | 66717941 | NC_000010.11 | 12 | 6 |
| chr10 | 74291798 | 74291787 | NC_000010.11 | 12 | 6 |
| chr10 | 82621770 | 82621781 | NC_000010.11 | 12 | 6 |
| chr10 | 91090519 | 91090530 | NC_000010.11 | 12 | 6 |
| chr10 | 99682921 | 99682910 | NC_000010.11 | 12 | 6 |
| chr10 | 107653284 | 107653273 | NC_000010.11 | 12 | 6 |
| chr10 | 127387876 | 127387887 | NC_000010.11 | 12 | 6 |
| chr1l | 10330421 | 10330410 | NC_000011.10 | 12 | 6 |
| chr11 | 21052051 | 21052062 | NC_000011.10 | 12 | 6 |
| chr11 | 56948810 | 56948799 | NC_000011.10 | 12 | 6 |
| chr11 | 91992913 | 91992902 | NC_000011.10 | 12 | 6 |
| chr11 | 96712150 | 96712139 | NC_000011.10 | 12 | 6 |
| chr11 | 99478699 | 99478710 | NC_000011.10 | 12 | 6 |
| chr11 | 103284503 | 103284514 | NC_000011.10 | 12 | 6 |
| chr11 | 110624774 | 110624763 | NC_000011.10 | 12 | 6 |
| chr11 | 118226686 | 118226697 | NC_000011.10 | 12 | 6 |
| chr11 | 121927186 | 121927175 | NC_000011.10 | 12 | 6 |
| chr11 | 127371998 | 127372009 | NC_000011.10 | 12 | 6 |
| chr12 | 21742376 | 21742387 | NC_000012.12 | 12 | 6 |
| chr12 | 33375091 | 33375102 | NC_000012.12 | 12 | 6 |
| chr12 | 79305333 | 79305322 | NC_000012.12 | 12 | 6 |
| chr12 | 87018030 | 87018041 | NC_000012.12 | 12 | 6 |
| chr12 | 97027085 | 97027074 | NC_000012.12 | 12 | 6 |
| chr12 | 97030674 | 97030685 | NC_000012.12 | 12 | 6 |
| chr12 | 97794786 | 97794775 | NC_000012.12 | 12 | 6 |
| chr12 | 99326334 | 99326345 | NC_000012.12 | 12 | 6 |
| chr12 | 100617295 | 100617284 | NC_000012.12 | 12 | 6 |
| chr12 | 106997614 | 106997603 | NC_000012.12 | 12 | 6 |
| chr12 | 114419769 | 114419758 | NC_000012.12 | 12 | 6 |
| chr13 | 29428703 | 29428714 | NC_000013.11 | 12 | 6 |
| chr13 | 34838980 | 34838991 | NC_000013.11 | 12 | 6 |
| chr13 | 68672648 | 68672637 | NC_000013.11 | 12 | 6 |
| chr13 | 68677576 | 68677565 | NC_000013.11 | 12 | 6 |
| chr13 | 79534292 | 79534303 | NC_000013.11 | 12 | 6 |
| chr13 | 83374368 | 83374357 | NC_000013.11 | 12 | 6 |
| chr13 | 91208120 | 91208131 | NC_000013.11 | 12 | 6 |
| chr13 | 92057240 | 92057251 | NC_000013.11 | 12 | 6 |
| chr13 | 105912154 | 105912165 | NC_000013.11 | 12 | 6 |
| chr14 | 37970959 | 37970948 | NC_000014.9 | 12 | 6 |
| chr14 | 40492006 | 40491995 | NC_000014.9 | 12 | 6 |
| chr14 | 44782915 | 44782926 | NC_000014.9 | 12 | 6 |
| chr14 | 48758306 | 48758317 | NC_000014.9 | 12 | 6 |
| chr14 | 88004548 | 88004537 | NC_000014.9 | 12 | 6 |
| chr15 | 56610753 | 56610764 | NC_000015.10 | 12 | 6 |
| chr15 | 70757589 | 70757578 | NC_000015.10 | 12 | 6 |
| chr15 | 96964230 | 96964219 | NC_000015.10 | 12 | 6 |
| chr16 | 66442829 | 66442818 | NC_000016.10 | 12 | 6 |
| chr16 | 74623964 | 74623975 | NC_000016.10 | 12 | 6 |
| chr16 | 75189302 | 75189291 | NC_000016.10 | 12 | 6 |
| chr17 | 9332911 | 9332900 | NC_000017.11 | 12 | 6 |
| chr18 | 32474384 | 32474373 | NC_000018.10 | 12 | 6 |
| chr18 | 34128952 | 34128963 | NC_000018.10 | 12 | 6 |
| chr18 | 55039826 | 55039815 | NC_000018.10 | 12 | 6 |
| chr18 | 78931519 | 78931508 | NC_000018.10 | 12 | 6 |
| chr19 | 31065225 | 31065236 | NC_000019.10 | 12 | 6 |
| chr19 | 32434028 | 32434017 | NC_000019.10 | 12 | 6 |
| chr19 | 51221292 | 51221303 | NC_000019.10 | 12 | 6 |
| chr20 | 1361969 | 1361958 | NC_000020.11 | 12 | 6 |
| chr20 | 4448895 | 4448906 | NC_000020.11 | 12 | 6 |
| chr20 | 13696489 | 13696478 | NC_000020.11 | 12 | 6 |
| chr20 | 20275384 | 20275395 | NC_000020.11 | 12 | 6 |
| chr20 | 26367536 | 26367525 | NC_000020.11 | 12 | 6 |
| chr21 | 37223237 | 37223248 | NC_000021.9 | 12 | 6 |
| chr21 | 46496495 | 46496484 | NC_000021.9 | 12 | 6 |
| chr22 | 39560335 | 39560346 | NC_000022.11 | 12 | 6 |
| chrX | 986645 | 986656 | NC_000023.11 | 12 | 6 |
| chrX | 5921242 | 5921253 | NC_000023.11 | 12 | 6 |
| chrX | 6765829 | 6765840 | NC_000023.11 | 12 | 6 |
| chrX | 15504137 | 15504126 | NC_000023.11 | 12 | 6 |
| chrX | 22546280 | 22546269 | NC_000023.11 | 12 | 6 |
| chrX | 41199361 | 41199372 | NC_000023.11 | 12 | 6 |
| chrX | 43885293 | 43885282 | NC_000023.11 | 12 | 6 |
| chrX | 67874307 | 67874296 | NC_000023.11 | 12 | 6 |
| chrX | 110216026 | 110216037 | NC_000023.11 | 12 | 6 |
| chrX | 110566890 | 110566879 | NC_000023.11 | 12 | 6 |
| chrX | 111357390 | 111357379 | NC_000023.11 | 12 | 6 |
| chrX | 150589443 | 150589454 | NC_000023.11 | 12 | 6 |
| chr01 | 23207589 | 23207577 | NC_000001.11 | 13 | 5 |
| chr01 | 25897408 | 25897420 | NC_000001.11 | 13 | 5 |
| chr01 | 65491478 | 65491490 | NC_000001.11 | 13 | 5 |
| chr01 | 154831168 | 154831180 | NC_000001.11 | 13 | 5 |
| chr02 | 35254361 | 35254349 | NC_000002.12 | 13 | 5 |
| chr02 | 207969171 | 207969159 | NC_000002.12 | 13 | 5 |
| chr03 | 185371630 | 185371642 | NC_000003.12 | 13 | 5 |
| chr04 | 46469891 | 46469879 | NC_000004.12 | 13 | 5 |
| chr04 | 105058847 | 105058835 | NC_000004.12 | 13 | 5 |
| chr04 | 124730032 | 124730044 | NC_000004.12 | 13 | 5 |
| chr04 | 158619352 | 158619364 | NC_000004.12 | 13 | 5 |
| chr06 | 85949972 | 85949960 | NC_000006.12 | 13 | 5 |
| chr06 | 109604972 | 109604960 | NC_000006.12 | 13 | 5 |
| chr10 | 59089285 | 59089273 | NC_000010.11 | 13 | 5 |
| chr10 | 99263586 | 99263598 | NC_000010.11 | 13 | 5 |
| chr11 | 96315922 | 96315934 | NC_000011.10 | 13 | 5 |
| chr15 | 33186727 | 33186715 | NC_000015.10 | 13 | 5 |
| chr15 | 87091718 | 87091706 | NC_000015.10 | 13 | 5 |
| chr16 | 16972153 | 16972165 | NC_000016.10 | 13 | 5 |
| chr16 | 59986446 | 59986458 | NC_000016.10 | 13 | 5 |
| chr18 | 12587445 | 12587457 | NC_000018.10 | 13 | 5 |
| chr18 | 78691060 | 78691048 | NC_000018.10 | 13 | 5 |
| chr19 | 39627504 | 39627492 | NC_000019.10 | 13 | 5 |
| chr19 | 54674561 | 54674573 | NC_000019.10 | 13 | 5 |
| chr20 | 30512867 | 30512855 | NC_000020.11 | 13 | 5 |
| chr20 | 45173430 | 45173442 | NC_000020.11 | 13 | 5 |
| chr21 | 35062647 | 35062659 | NC_000021.9 | 13 | 5 |
| chrX | 77412877 | 77412889 | NC_000023.11 | 13 | 5 |
| chrX | 130349739 | 130349727 | NC_000023.11 | 13 | 5 |
| chr01 | 8663054 | 8663065 | NC_000001.11 | 12 | 5 |
| chr01 | 26335998 | 26336009 | NC_000001.11 | 12 | 5 |
| chr01 | 42582606 | 42582595 | NC_000001.11 | 12 | 5 |
| chr01 | 47032830 | 47032819 | NC_000001.11 | 12 | 5 |
| chr01 | 69196253 | 69196264 | NC_000001.11 | 12 | 5 |
| chr01 | 70300023 | 70300034 | NC_000001.11 | 12 | 5 |
| chr01 | 82771042 | 82771053 | NC_000001.11 | 12 | 5 |
| chr01 | 100102957 | 100102946 | NC_000001.11 | 12 | 5 |
| chr01 | 107996202 | 107996213 | NC_000001.11 | 12 | 5 |
| chr01 | 162211653 | 162211642 | NC_000001.11 | 12 | 5 |
| chr01 | 208646365 | 208646354 | NC_000001.11 | 12 | 5 |
| chr01 | 215734460 | 215734449 | NC_000001.11 | 12 | 5 |
| chr01 | 234143991 | 234144002 | NC_000001.11 | 12 | 5 |
| chr01 | 241045297 | 241045286 | NC_000001.11 | 12 | 5 |
| chr02 | 140780861 | 140780872 | NC_000002.12 | 12 | 5 |
| chr02 | 149162575 | 149162586 | NC_000002.12 | 12 | 5 |
| chr02 | 162692841 | 162692852 | NC_000002.12 | 12 | 5 |
| chr02 | 222738270 | 222738259 | NC_000002.12 | 12 | 5 |
| chr03 | 67248099 | 67248110 | NC_000003.12 | 12 | 5 |
| chr03 | 174292637 | 174292648 | NC_000003.12 | 12 | 5 |
| chr04 | 12331297 | 12331308 | NC_000004.12 | 12 | 5 |
| chr04 | 21504937 | 21504948 | NC_000004.12 | 12 | 5 |
| chr04 | 43962965 | 43962976 | NC_000004.12 | 12 | 5 |
| chr04 | 57433948 | 57433937 | NC_000004.12 | 12 | 5 |
| chr04 | 85682861 | 85682872 | NC_000004.12 | 12 | 5 |
| chr04 | 106114290 | 106114301 | NC_000004.12 | 12 | 5 |
| chr04 | 113028283 | 113028294 | NC_000004.12 | 12 | 5 |
| chr04 | 151151805 | 151151794 | NC_000004.12 | 12 | 5 |
| chr04 | 152051162 | 152051173 | NC_000004.12 | 12 | 5 |
| chr04 | 179052931 | 179052920 | NC_000004.12 | 12 | 5 |
| chr05 | 6661409 | 6661420 | NC_000005.10 | 12 | 5 |
| chr05 | 93549147 | 93549158 | NC_000005.10 | 12 | 5 |
| chr05 | 148916732 | 148916721 | NC_000005.10 | 12 | 5 |
| chr05 | 153193520 | 153193531 | NC_000005.10 | 12 | 5 |
| chr05 | 169165696 | 169165685 | NC_000005.10 | 12 | 5 |
| chr06 | 99056822 | 99056833 | NC_000006.12 | 12 | 5 |
| chr07 | 21203640 | 21203651 | NC_000007.14 | 12 | 5 |
| chr07 | 27364344 | 27364355 | NC_000007.14 | 12 | 5 |
| chr07 | 45331667 | 45331656 | NC_000007.14 | 12 | 5 |
| chr08 | 28102047 | 28102036 | NC_000008.11 | 12 | 5 |
| chr08 | 64148089 | 64148078 | NC_000008.11 | 12 | 5 |
| chr08 | 121058238 | 121058249 | NC_000008.11 | 12 | 5 |
| chr08 | 134902692 | 134902681 | NC_000008.11 | 12 | 5 |
| chr09 | 26814924 | 26814935 | NC_000009.12 | 12 | 5 |
| chr09 | 35739632 | 35739643 | NC_000009.12 | 12 | 5 |
| chr09 | 77017601 | 77017612 | NC_000009.12 | 12 | 5 |
| chr09 | 83041777 | 83041788 | NC_000009.12 | 12 | 5 |
| chr09 | 87072669 | 87072658 | NC_000009.12 | 12 | 5 |
| chr09 | 134613617 | 134613628 | NC_000009.12 | 12 | 5 |
| chr10 | 7938397 | 7938408 | NC_000010.11 | 12 | 5 |
| chr10 | 59688277 | 59688266 | NC_000010.11 | 12 | 5 |
| chr10 | 91834373 | 91834384 | NC_000010.11 | 12 | 5 |
| chr10 | 106036664 | 106036653 | NC_000010.11 | 12 | 5 |
| chr11 | 1648239 | 1648228 | NC_000011.10 | 12 | 5 |
| chr11 | 28286474 | 28286485 | NC_000011.10 | 12 | 5 |
| chr11 | 59609982 | 59609993 | NC_000011.10 | 12 | 5 |
| chr11 | 82154773 | 82154784 | NC_000011.10 | 12 | 5 |
| chr12 | 56884436 | 56884425 | NC_000012.12 | 12 | 5 |
| chr12 | 65309897 | 65309908 | NC_000012.12 | 12 | 5 |
| chr12 | 70312802 | 70312791 | NC_000012.12 | 12 | 5 |
| chr12 | 108169798 | 108169809 | NC_000012.12 | 12 | 5 |
| chr13 | 41643771 | 41643782 | NC_000013.11 | 12 | 5 |
| chr13 | 43730188 | 43730177 | NC_000013.11 | 12 | 5 |
| chr13 | 66772070 | 66772081 | NC_000013.11 | 12 | 5 |
| chr13 | 67266239 | 67266250 | NC_000013.11 | 12 | 5 |
| chr13 | 70438394 | 70438405 | NC_000013.11 | 12 | 5 |
| chr13 | 72462904 | 72462915 | NC_000013.11 | 12 | 5 |
| chr13 | 73589220 | 73589209 | NC_000013.11 | 12 | 5 |
| chr13 | 114256981 | 114256970 | NC_000013.11 | 12 | 5 |
| chr14 | 53548116 | 53548105 | NC_000014.9 | 12 | 5 |
| chr14 | 91128016 | 91128005 | NC_000014.9 | 12 | 5 |
| chr15 | 55623598 | 55623609 | NC_000015.10 | 12 | 5 |
| chr15 | 59650410 | 59650421 | NC_000015.10 | 12 | 5 |
| chr15 | 67895787 | 67895798 | NC_000015.10 | 12 | 5 |
| chr15 | 75030887 | 75030898 | NC_000015.10 | 12 | 5 |
| chr15 | 80376611 | 80376600 | NC_000015.10 | 12 | 5 |
| chr17 | 2259971 | 2259960 | NC_000017.11 | 12 | 5 |
| chr17 | 13599804 | 13599793 | NC_000017.11 | 12 | 5 |
| chr17 | 49970374 | 49970385 | NC_000017.11 | 12 | 5 |
| chr17 | 74411987 | 74411998 | NC_000017.11 | 12 | 5 |
| chr18 | 6692184 | 6692173 | NC_000018.10 | 12 | 5 |
| chr18 | 26936361 | 26936372 | NC_000018.10 | 12 | 5 |
| chr18 | 32164785 | 32164796 | NC_000018.10 | 12 | 5 |
| chr18 | 57372141 | 57372152 | NC_000018.10 | 12 | 5 |
| chr18 | 76028676 | 76028665 | NC_000018.10 | 12 | 5 |
| chr18 | 79860251 | 79860240 | NC_000018.10 | 12 | 5 |
| chr20 | 2767508 | 2767497 | NC_000020.11 | 12 | 5 |
| chr20 | 32334864 | 32334853 | NC_000020.11 | 12 | 5 |
| chr20 | 42969400 | 42969411 | NC_000020.11 | 12 | 5 |
| chr21 | 15405882 | 15405871 | NC_000021.9 | 12 | 5 |
| chr21 | 27128817 | 27128828 | NC_000021.9 | 12 | 5 |
| chr21 | 27724878 | 27724889 | NC_000021.9 | 12 | 5 |
| chr21 | 33775512 | 33775523 | NC_000021.9 | 12 | 5 |
| chr22 | 40201219 | 40201208 | NC_000022.11 | 12 | 5 |
| chrX | 24583713 | 24583724 | NC_000023.11 | 12 | 5 |
| chrX | 53003928 | 53003939 | NC_000023.11 | 12 | 5 |
| chrX | 75537169 | 75537180 | NC_000023.11 | 12 | 5 |
| chrX | 91187582 | 91187593 | NC_000023.11 | 12 | 5 |
| chr01 | 237603124 | 237603136 | NC_000001.11 | 13 | 4 |
| chr02 | 132279864 | 132279852 | NC_000002.12 | 13 | 4 |
| chr02 | 176672291 | 176672279 | NC_000002.12 | 13 | 4 |
| chr04 | 47096940 | 47096952 | NC_000004.12 | 13 | 4 |
| chr05 | 170123837 | 170123825 | NC_000005.10 | 13 | 4 |
| chr10 | 97944808 | 97944796 | NC_000010.11 | 13 | 4 |
| chr10 | 114226626 | 114226614 | NC_000010.11 | 13 | 4 |
| chr13 | 67884795 | 67884783 | NC_000013.11 | 13 | 4 |
| chr14 | 59591410 | 59591398 | NC_000014.9 | 13 | 4 |
| chr16 | 3659076 | 3659088 | NC_000016.10 | 13 | 4 |
| chr18 | 25418784 | 25418772 | NC_000018.10 | 13 | 4 |
| chrX | 45634061 | 45634049 | NC_000023.11 | 13 | 4 |
| chr01 | 3217976 | 3217987 | NC_000001.11 | 12 | 4 |
| chr01 | 92837827 | 92837816 | NC_000001.11 | 12 | 4 |
| chr01 | 112701651 | 112701662 | NC_000001.11 | 12 | 4 |
| chr01 | 166000671 | 166000660 | NC_000001.11 | 12 | 4 |
| chr01 | 178801277 | 178801288 | NC_000001.11 | 12 | 4 |
| chr02 | 177290177 | 177290166 | NC_000002.12 | 12 | 4 |
| chr02 | 218084695 | 218084706 | NC_000002.12 | 12 | 4 |
| chr02 | 236494650 | 236494639 | NC_000002.12 | 12 | 4 |
| chr04 | 42894460 | 42894471 | NC_000004.12 | 12 | 4 |
| chr04 | 66200304 | 66200315 | NC_000004.12 | 12 | 4 |
| chr06 | 35644009 | 35643998 | NC_000006.12 | 12 | 4 |
| chr06 | 35671520 | 35671531 | NC_000006.12 | 12 | 4 |
| chr09 | 95179956 | 95179945 | NC_000009.12 | 12 | 4 |
| chr09 | 122078420 | 122078431 | NC_000009.12 | 12 | 4 |
| chr09 | 132891241 | 132891252 | NC_000009.12 | 12 | 4 |
| chr09 | 134244101 | 134244112 | NC_000009.12 | 12 | 4 |
| chr10 | 46934395 | 46934384 | NC_000010.11 | 12 | 4 |
| chr10 | 48117437 | 48117448 | NC_000010.11 | 12 | 4 |
| chr10 | 102716315 | 102716304 | NC_000010.11 | 12 | 4 |
| chr12 | 31614069 | 31614080 | NC_000012.12 | 12 | 4 |
| chr13 | 18693215 | 18693204 | NC_000013.11 | 12 | 4 |
| chr14 | 30845671 | 30845660 | NC_000014.9 | 12 | 4 |
| chr14 | 94062711 | 94062722 | NC_000014.9 | 12 | 4 |
| chr17 | 10363532 | 10363543 | NC_000017.11 | 12 | 4 |
| chr17 | 59667014 | 59667025 | NC_000017.11 | 12 | 4 |
| chr17 | 68278027 | 68278038 | NC_000017.11 | 12 | 4 |
| chr18 | 44686796 | 44686785 | NC_000018.10 | 12 | 4 |
| chr18 | 55570049 | 55570060 | NC_000018.10 | 12 | 4 |
| chr20 | 37099530 | 37099519 | NC_000020.11 | 12 | 4 |
| chr21 | 14473970 | 14473981 | NC_000021.9 | 12 | 4 |
| chr21 | 28191101 | 28191112 | NC_000021.9 | 12 | 4 |
| chr01 | 85362838 | 85362827 | NC_000001.11 | 12 | 3 |
| chr14 | 106817445 | 106817434 | NC_000014.9 | 12 | 3 |
| chr17 | 12074729 | 12074718 | NC_000017.11 | 12 | 3 |
| chr21 | 8217645 | 8217657 | NC_000021.9 | 13 | 2 |
| chr21 | 8400683 | 8400695 | NC_000021.9 | 13 | 2 |
| chr21 | 8444915 | 8444927 | NC_000021.9 | 13 | 2 |
| chr01 | 65227883 | 65227872 | NC_000001.11 | 12 | 2 |
| chr17 | 31347890 | 31347879 | NC_000017.11 | 12 | 1 |

### Example 3: Retargeting of a Gene Writer to a Genomic Safe Harbor Site

[0667] This example describes a Gene Writer comprising a heterologous DNA binding domain that redirects its activity to a genomic safe harbor site.

[0668] In this example, the Gene Writer polypeptide sequence is altered to where its natural DNA binding domain is replaced, mutated/inactivated, and/or joined with another polypeptide sequence that can redirect the Gene Writer system to another genomic location that is not its endogenous or natural binding site. In some instances, the polypeptide sequence that redirects the Gene Writer system to a non-natural genomic location may also be attached and/or inserted to any module of the Gene Writer polypeptide sequence.

[0669] In some embodiments, the polypeptide sequence used to redirect the Gene Writer system to a non-natural genomic target encodes for: a zinc finger, a series of adjacent, regularly, or irregularly spaced zinc fingers, a transcription activator-like effector (TALE), a series of adjacent, regularly, or irregularly spaced a transcription activator-like effectors (TALEs), Cas9, Cas9 with mutations to its catalytic residues inactivating the double-stranded DNA endonuclease activity (referred to as catalytically-dead Cas9 (dCas9)), Cas9 with a point mutation or multiple point mutations in a single catalytic domain in order to render Cas9 endonuclease only able to cleave one strand of double-stranded DNA (referred to as Cas9 nickase) (see FIG. 5).

[0670] In some embodiments, the polypeptide sequence used to re-direct the Gene Writer system targets a genomic safe-harbor location (e.g., AAVS1 site on human chromosome 19) (Pellenz, S., et. al., Human Gene Therapy, 30(7), 814-828, 2019), see FIGS. 4 and 6. In further embodiments, the polypeptide sequence used to re-direct the Gene Writer polypeptide sequence is used in conjunction with a nucleic acid that targets the genomic safe harbor location (e.g., the polypeptide sequence for catalytic dead Cas9 along with a single-guide RNA targeting the AAVS1 site on chromosome 19).

TABLE E4
Re-targeted Gene Writer constructs. Examples shown
are to re-target R2Tg Gene Writer polypeptide sequence
to the AAVS1 site using ZF or Cas9 domains.

| | Polypeptide Sequence |
|---|---|
| Gene Writer | (Re-targeting polypeptide sequence, |
| Polypeptide Name | italic. Linker, bold underline) |
| AAVS1 Left ZFP | MGIHGVPAAMAERPFQCRICMRNFSYNWHLQRHIRTHTGEKPFACDICGRKFA |
| attached at v2 | RSDHLTTHTKIHTGSQKPFQCRICMRNFSHNYARDCHIRTHTGEKPFACDICG |
| location of DBD of | RKFAQNSTRIGHTKIHLRGSGGGSTATRDKKDTVTREKHPKKPFQK+MKDRAI |
| R2Tg with 3GS | KKGNYLRFQRLFYLDRGKLAKIILDDIECLSCDIPLSEIYSVFKTRWETTGSF |
| linker (SEQ ID NO: | KSLGDFKTYGKADNTAFRELITAKEIEKNVQEMSKGSAPGPDGITLGDVVKMD |
| 1024) | PEFSRTMEIFNLWLTTGKIPDMVRGCRTVLIPKSSKPDRLKDINNWRPITIGS |
| | ILLRLFSRIVTARLSKACPLNPRQRGFIRAAGCSENLKLLQTIIWSAKREHRP |
| | LGVVFVDIAKAFDTVSHQHIIHALQQREVDPHIVGLVSNMYENISTYITTKRN |
| | THTDKIQIRVGVKQGDPMSPLLFNLAMDPLLCKLEESGKGYHRGQSSITAMAF |
| | ADDLVLLSDSWENMNTNISILETFCNLTGLKTQGQKCHGFYIKPTKDSYTIND |
| | CAAWTINGTPLNMIDPGESEKYLGLQFDPWIGIARSGLSTKLDFWLQRIDQAP |
| | LKPLQKTDILKTYTIPRLIYIADHSEVKTALLETLDQKIRTAVKEWLHLPPCT |
| | CDAILYSSTRDGGLGITKLAGLIPSVQARRLHRIAQSSDDTMKCFMEKEKMEQ |
| | LHKKLWIQAGGDRENIPSIWEAPPSSEPPNNVSTNSEWEAPTQKDKFPKPCNW |
| | RKNEFKKWTKLASQGRGIVNFERDKISNHWIQYYRRIPHRKLLTALQLRANVY |
| | PTREFLARGRQDQYIKACRHCDADIESCAHIIGNCPVTQDARIKRHNYICELL |
| | LEEAKKKDWVVFKEPHIRDSNKELYKPDLIFVKDARALVVDVTVRYEAAKSSL |
| | EEAAAEKVRKYKHLETEVRHLTNAKDVTFVGFPLGARGKWHQDNFKLLTELGL |
| | SKSRQVKMAETFSTVALFSSVDIVHMFASRARKSMVM (SEQ ID NO: |
| | 1662) |
| AAVS1 Left ZFP | MGIHGVPAAMAERPFQCRICMRNFSYNWHLQRHIRTHTGEKPFACDICGRKFA |
| attached at v2 | RSDHLTTHTKIHTGSQKPFQCRICMRNFSHNYARDCHIRTHTGEKPFACDICG |
| location of DBD of | RKFAQNSTRIGHTKIHLRGSSGSETPGTSESATPESTATRDKKDTVTREKHPK |
| R2Tg with XTEN | KPFQKWMKDRAIKKGNYLRFQRLFYLDRGKLAKIILDDIECLSCDIPLSEIYS |
| linker | VFKTRWETTGSFKSLGDFKTYGKADNTAFRELITAKEIEKNVQEMSKGSAPGP |
| | DGITLGDVVKMDPEFSRTMEIFNLWLTTGKIPDMVRGCRTVLIPKSSKPDRLK |
| | DINNWRPITIGSILLRLFSRIVTARLSKACPLNPRQRGFIRAAGCSENLKLLQ |
| | TIIWSAKREHRPLGVVFVDIAKAFDTVSHQHIIHALQQREVDPHIVGLVSNMY |
| | ENISTYITTKRNTHTDKIQIRVGVKQGDPMSPLLFNLAMDPLLCKLEESGKGY |
| | HRGQSSITAMAFADDLVLLSDSWENMNTNISILETFCNLTGLKTQGQKCHGFY |
| | IKPTKDSYTINDCAAWTINGTPLNMIDPGESEKYLGLQFDPWIGIARSGLSTK |
| | LDFWLQRIDQAPLKPLQKTDILKTYTIPRLIYIADHSEVKTALLETLDQKIRT |
| | AVKEWLHLPPCTCDAILYSSTRDGGLGITKLAGLIPSVQARRLHRIAQSSDDT |
| | MKCFMEKEKMEQLHKKLWIQAGGDRENIPSIWEAPPSSEPPNNVSTNSEWEAP |
| | TQKDKFPKPCNWRKNEFKKWTKLASQGRGIVNFERDKISNHWIQYYRRIPHRK |
| | LLTALQLRANVYPTREFLARGRQDQYIKACRHCDADIESCAHIIGNCPVTQDA |
| | RIKRHNYICELLLEEAKKKDWVVFKEPHIRDSNKELYKPDLIFVKDARALVVD |
| | VTVRYEAAKSSLEEAAAEKVRKYKHLETEVRHLTNAKDVTFVGFPLGARGKWH |
| | QDNFKLLTELGLSKSRQVKMAETFSTVALFSSVDIVHMFASRARKSMVM |
| | (SEQ ID NO: 1663) |
| AAVS1 Left ZFP | MGIHGVPAAMAERPFQCRICMRNFSYNWHLQRHIRTHTGEKPFACDICGRKFA |
| attached at v1 | RSDHLTTHTKIHTGSQKPFQCRICMRNFSHNYARDCHIRTHTGEKPFACDICG |
| location of DBD of | RKFAQNSTRIGHTKIHLRGSGGGSCFGCLESISQIRTATRDKKDTVTREKHPK |
| R2Tg with 3GS | KPFQKWMKDRAIKKGNYLRFQRLFYLDRGKLAKIILDDIECLSCDIPLSEIYS |
| linker (SEQ ID NO: | VFKTRWETTGSFKSLGDFKTYGKADNTAFRELITAKEIEKNVQEMSKGSAPGP |
| 1024) | DGITLGDVVKMDPEFSRTMEIFNLWLTTGKIPDMVRGCRTVLIPKSSKPDRLK |
| | DINNWRPITIGSILLRLFSRIVTARLSKACPLNPRQRGFIRAAGCSENLKLLQ |
| | TIIWSAKREHRPLGVVFVDIAKAFDTVSHQHIIHALQQREVDPHIVGLVSNMY |
| | ENISTYITTKRNTHTDKIQIRVGVKQGDPMSPLLFNLAMDPLLCKLEESGKGY |
| | HRGQSSITAMAFADDLVLLSDSWENMNTNISILETFCNLTGLKTQGQKCHGFY |
| | IKPTKDSYTINDCAAWTINGTPLNMIDPGESEKYLGLQFDPWIGIARSGLSTK |
| | LDFWLQRIDQAPLKPLQKTDILKTYTIPRLIYIADHSEVKTALLETLDQKIRT |
| | AVKEWLHLPPCTCDAILYSSTRDGGLGITKLAGLIPSVQARRLHRIAQSSDDT |
| | MKCFMEKEKMEQLHKKLWIQAGGDRENIPSIWEAPPSSEPPNNVSTNSEWEAP |
| | TQKDKFPKPCNWRKNEFKKWTKLASQGRGIVNFERDKISNHWIQYYRRIPHRK |
| | LLTALQLRANVYPTREFLARGRQDQYIKACRHCDADIESCAHIIGNCPVTQDA |
| | RIKRHNYICELLLEEAKKKDWVVFKEPHIRDSNKELYKPDLIFVKDARALVVD |
| | VTVRYEAAKSSLEEAAAEKVRKYKHLETEVRHLTNAKDVTFVGFPLGARGKWH |
| | QDNFKLLTELGLSKSRQVKMAETFSTVALFSSVDIVHMFASRARKSMVM |
| | (SEQ ID NO: 1664) |
| AAVS1 Left ZFP | MGIHGVPAAMAERPFQCRICMRNFSYNWHLQRHIRTHTGEKPFACDICGRKFA |
| attached at v1 | RSDHLTTHTKIHTGSQKPFQCRICMRNFSHNYARDCHIRTHTGEKPFACDICG |
| location of DBD of | RKFAQNSTRIGHTKIHLRGSSGSETPGTSESATPESCFGCLESISQIRTATRD |
| R2Tg with XTEN | KKDTVTREKHPKKPFQKWMKDRAIKKGNYLRFQRLFYLDRGKLAKIILDDIEC |
| linker | LSCDIPLSEIYSVFKTRWETTGSFKSLGDFKTYGKADNTAFRELITAKEIEKN |
| | VQEMSKGSAPGPDGITLGDVVKMDPEFSRTMEIFNLWLTTGKIPDMVRGCRTV |
| | LIPKSSKPDRLKDINNWRPITIGSILLRLFSRIVTARLSKACPLNPRQRGFIR |
| | AAGCSENLKLLQTIIWSAKREHRPLGVVFVDIAKAFDTVSHQHIIHALQQREV |
| | DPHIVGLVSNMYENISTYITTKRNTHTDKIQIRVGVKQGDPMSPLLFNLAMDP |
| | LLCKLEESGKGYHRGQSSITAMAFADDLVLLSDSWENMNTNISILETFCNLTG |
| | LKTQGQKCHGFYIKPTKDSYTINDCAAWTINGTPLNMIDPGESEKYLGLQFDP |
| | WIGIARSGLSTKLDFWLQRIDQAPLKPLQKTDILKTYTIPRLIYIADHSEVKT |
| | ALLETLDQKIRTAVKEWLHLPPCTCDAILYSSTRDGGLGITKLAGLIPSVQAR |
| | RLHRIAQSSDDTMKCFMEKEKMEQLHKKLWIQAGGDRENIPSIWEAPPSSEPP |
| | NNVSTNSEWEAPTQKDKFPKPCNWRKNEFKKWTKLASQGRGIVNFERDKISNH |
| | WIQYYRRIPHRKLLTALQLRANVYPTREFLARGRQDQYIKACRHCDADIESCA |
| | HIIGNCPVTQDARIKRHNYICELLLEEAKKKDWVVFKEPHIRDSNKELYKPDL |
| | IFVKDARALVVDVTVRYEAAKSSLEEAAAEKVRKYKHLETEVRHLTNAKDVTF |
| | VGFPLGARGKWHQDNFKLLTELGLSKSRQVKMAETFSTVALFSSVDIVHMFAS |
| | RARKSMVM (SEQ ID NO: 1665) |
| AAVS1 Right ZFP | MGIHGVPAAMAERPFQCRICMRNFSQSSNLARHIRTHTGEKPFACDICGRKFA |
| attached at v2 | RTDYLVDHTKIHTGSQKPFQCRICMRNFSYNTHLTRHIRTHTGEKPFACDICG |
| location of DBD of | RKFAQGYNLAGHTKIHLRGSGGGSTATRDKKDTVTREKHPKKPFQKWMKDRAI |
| R2Tg with 3GS | KKGNYLRFQRLFYLDRGKLAKIILDDIECLSCDIPLSEIYSVFKTRWETTGSF |
| linker (SEQ ID NO: | KSLGDFKTYGKADNTAFRELITAKEIEKNVQEMSKGSAPGPDGITLGDVVKMD |
| 1024) | PEFSRTMEIFNLWLTTGKIPDMVRGCRTVLIPKSSKPDRLKDINNWRPITIGS |
| | ILLRLFSRIVTARLSKACPLNPRQRGFIRAAGCSENLKLLQTIIWSAKREHRP |
| | LGVVFVDIAKAFDTVSHQHIIHALQQREVDPHIVGLVSNMYENISTYITTKRN |
| | THTDKIQIRVGVKQGDPMSPLLFNLAMDPLLCKLEESGKGYHRGQSSITAMAF |
| | ADDLVLLSDSWENMNTNISILETFCNLTGLKTQGQKCHGFYIKPTKDSYTIND |
| | CAAWTINGTPLNMIDPGESEKYLGLQFDPWIGIARSGLSTKLDFWLQRIDQAP |
| | LKPLQKTDILKTYTIPRLIYIADHSEVKTALLETLDQKIRTAVKEWLHLPPCT |
| | CDAILYSSTRDGGLGITKLAGLIPSVQARRLHRIAQSSDDTMKCFMEKEKMEQ |
| | LHKKLWIQAGGDRENIPSIWEAPPSSEPPNNVSTNSEWEAPTQKDKFPKPCNW |
| | RKNEFKKWTKLASQGRGIVNFERDKISNHWIQYYRRIPHRKLLTALQLRANVY |
| | PTREFLARGRQDQYIKACRHCDADIESCAHIIGNCPVTQDARIKRHNYICELL |
| | LEEAKKKDWWFKEPHIRDSNKELYKPDLIFVKDARALVVDVTVRYEAAKSSL |
| | EEAAAEKVRKYKHLETEVRHLTNAKDVTFVGFPLGARGKWHQDNFKLLTELGL |
| | SKSRQVKMAETFSTVALFSSVDIVHMFASRARKSMVM (SEQ ID NO: |
| | 1666) |
| AAVS1 Right ZFP | MGIHGVPAAMAERPFQCRICMRNFSQSSNLARHIRTHTGEKPFACDICGRKFA |
| attached at v2 | RTDYLVDHTKIHTGSQKPFQCRICMRNFSYNTHLTRHIRTHTGEKPFACDICG |
| location of DBD of | RKFAQGYNLAGHTKIHLRGSSGSETPGTSESATPESTATRDKKDTVTREKHPK |
| R2Tg with XTEN | KPFQKWMKDRAIKKGNYLRFQRLFYLDRGKLAKIILDDIECLSCDIPLSEIYS |
| linker | VFKTRWETTGSFKSLGDFKTYGKADNTAFRELITAKEIEKNVQEMSKGSAPGP |
| | DGITLGDVVKMDPEFSRTMEIFNLWLTTGKIPDMVRGCRTVLIPKSSKPDRLK |
| | DINNWRPITIGSILLRLFSRIVTARLSKACPLNPRQRGFIRAAGCSENLKLLQ |
| | TIIWSAKREHRPLGVVFVDIAKAFDTVSHQHIIHALQQREVDPHIVGLVSNMY |
| | ENISTYITTKRNTHTDKIQIRVGVKQGDPMSPLLFNLAMDPLLCKLEESGKGY |
| | HRGQSSITAMAFADDLVLLSDSWENMNTNISILETFCNLTGLKTQGQKCHGFY |
| | IKPTKDSYTINDCAAWTINGTPLNMIDPGESEKYLGLQFDPWIGIARSGLSTK |
| | LDFWLQRIDQAPLKPLQKTDILKTYTIPRLIYIADHSEVKTALLETLDQKIRT |
| | AVKEWLHLPPCTCDAILYSSTRDGGLGITKLAGLIPSVQARRLHRIAQSSDDT |
| | MKCFMEKEKMEQLHKKLWIQAGGDRENIPSIWEAPPSSEPPNNVSTNSEWEAP |
| | TQKDKFPKPCNWRKNEFKKWTKLASQGRGIVNFERDKISNHWIQYYRRIPHRK |
| | LLTALQLRANVYPTREFLARGRQDQYIKACRHCDADIESCAHIIGNCPVTQDA |
| | RIKRHNYICELLLEEAKKKDWVVFKEPHIRDSNKELYKPDLIFVKDARALVVD |
| | VTVRYEAAKSSLEEAAAEKVRKYKHLETEVRHLTNAKDVTFVGFPLGARGKWH |
| | QDNFKLLTELGLSKSRQVKMAETFSTVALFSSVDIVHMFASRARKSMVM |
| | (SEQ ID NO: 1667) |
| AAVS1 Right ZFP | MGIHGVPAAMAERPFQCRICMRNFSQSSNLARHIRTHTGEKPFACDICGRKFA |
| attached at v1 | RTDYLVDHTKIHTGSQKPFQCRICMRNFSYNTHLTRHIRTHTGEKPFACDICG |
| location of DBD of | RKFAQGYNLAGHTKIHLRGSGGGSCFGCLESISQIRTATRDKKDTVTREKHPK |
| R2Tg with 3GS | KPFQKWMKDRAIKKGNYLRFQRLFYLDRGKLAKIILDDIECLSCDIPLSEIYS |
| linker (SEQ ID NO: | VFKTRWETTGSFKSLGDFKTYGKADNTAFRELITAKEIEKNVQEMSKGSAPGP |
| 1024) | DGITLGDVVKMDPEFSRTMEIFNLWLTTGKIPDMVRGCRTVLIPKSSKPDRLK |
| | DINNWRPITIGSILLRLFSRIVTARLSKACPLNPRQRGFIRAAGCSENLKLLQ |
| | TIIWSAKREHRPLGVVFVDIAKAFDTVSHQHIIHALQQREVDPHIVGLVSNMY |
| | ENISTYITTKRNTHTDKIQIRVGVKQGDPMSPLLFNLAMDPLLCKLEESGKGY |
| | HRGQSSITAMAFADDLVLLSDSWENMNTNISILETFCNLTGLKTQGQKCHGFY |
| | IKPTKDSYTINDCAAWTINGTPLNMIDPGESEKYLGLQFDPWIGIARSGLSTK |
| | LDFWLQRIDQAPLKPLQKTDILKTYTIPRLIYIADHSEVKTALLETLDQKIRT |
| | AVKEWLHLPPCTCDAILYSSTRDGGLGITKLAGLIPSVQARRLHRIAQSSDDT |
| | MKCFMEKEKMEQLHKKLWIQAGGDRENIPSIWEAPPSSEPPNNVSTNSEWEAP |
| | TQKDKFPKPCNWRKNEFKKWTKLASQGRGIVNFERDKISNHWIQYYRRIPHRK |
| | LLTALQLRANVYPTREFLARGRQDQYIKACRHCDADIESCAHIIGNCPVTQDA |
| | RIKRHNYICELLLEEAKKKDWVVFKEPHIRDSNKELYKPDLIFVKDARALVVD |
| | VTVRYEAAKSSLEEAAAEKVRKYKHLETEVRHLTNAKDVTFVGFPLGARGKWH |
| | QDNFKLLTELGLSKSRQVKMAETFSTVALFSSVDIVHMFASRARKSMVM |
| | (SEQ ID NO: 1668) |
| AAVS1 Right ZFP | MGIHGVPAAMAERPFQCRICMRNFSQSSNLARHIRTHTGEKPFACDICGRKFA |
| attached at v1 | RTDYLVDHTKIHTGSQKPFQCRICMRNFSYNTHLTRHIRTHTGEKPFACDICG |
| location of DBD of | RKFAQGYNLAGHTKIHLRGSSGSETPGTSESATPESCFGCLESISQIRTATRD |
| R2Tg with XTEN | KKDTVTREKHPKKPFQKWMKDRAIKKGNYLRFQRLFYLDRGKLAKIILDDIEC |
| linker | LSCDIPLSEIYSVFKTRWETTGSFKSLGDFKTYGKADNTAFRELITAKEIEKN |
| | VQEMSKGSAPGPDGITLGDVVKMDPEFSRTMEIFNLWLTTGKIPDMVRGCRTV |
| | LIPKSSKPDRLKDINNWRPITIGSILLRLFSRIVTARLSKACPLNPRQRGFIR |
| | AAGCSENLKLLQTIIWSAKREHRPLGVVFVDIAKAFDTVSHQHIIHALQQREV |
| | DPHIVGLVSNMYENISTYITTKRNTHTDKIQIRVGVKQGDPMSPLLFNLAMDP |
| | LLCKLEESGKGYHRGQSSITAMAFADDLVLLSDSWENMNTNISILETFCNLTG |
| | LKTQGQKCHGFYIKPTKDSYTINDCAAWTINGTPLNMIDPGESEKYLGLQFDP |
| | WIGIARSGLSTKLDFWLQRIDQAPLKPLQKTDILKTYTIPRLIYIADHSEVKT |
| | ALLETLDQKIRTAVKEWLHLPPCTCDAILYSSTRDGGLGITKLAGLIPSVQAR |
| | RLHRIAQSSDDTMKCFMEKEKMEQLHKKLWIQAGGDRENIPSIWEAPPSSEPP |
| | NNVSTNSEWEAPTQKDKFPKPCNWRKNEFKKWTKLASQGRGIVNFERDKISNH |
| | WIQYYRRIPHRKLLTALQLRANVYPTREFLARGRQDQYIKACRHCDADIESCA |
| | HIIGNCPVTQDARIKRHNYICELLLEEAKKKDWVVFKEPHIRDSNKELYKPDL |
| | IFVKDARALVVDVTVRYEAAKSSLEEAAAEKVRKYKHLETEVRHLTNAKDVTF |
| | VGFPLGARGKWHQDNFKLLTELGLSKSRQVKMAETFSTVALFSSVDIVHMFAS |
| | RARKSMVM (SEQ ID NO: 1669) |
| AAVS1 Left and | MGIHGVPAAMAERPFQCRICMRNFSYNWHLQRHIRTHTGEKPFACDICGRKFA |
| Right ZFP | RSDHLTTHTKIHTGSQKPFQCRICMRNFSHNYARDCHIRTHTGEKPFACDICG |
| (separated by XTEN | RKFAQNSTRIGHTKIHLRGSSGSETPGTSESATPESGIHGVPAAMAERPFQCR |
| linker) attached at | ICMRNFSQSSNLARHIRTHTGEKPFACDICGRKFARTDYLVDHTKIHTGSQKP |
| v2 location of DBD | FQCRICMRNFSYNTHLTRHIRTHTGEKPFACDICGRKFAQGYNLAGHTKIHLR |
| of R2Tg with 3GS | GSGGGSTATRDKKDTVTREKHPKKPFQKWMKDRAIKKGNYLRFQRLFYLDRGK |
| linker (SEQ ID NO: | LAKIILDDIECLSCDIPLSEIYSVFKTRWETTGSFKSLGDFKTYGKADNTAFR |
| 1024) | ELITAKEIEKNVQEMSKGSAPGPDGITLGDVVKMDPEFSRTMEIFNLWLTTGK |
| | IPDMVRGCRTVLIPKSSKPDRLKDINNWRPITIGSILLRLFSRIVTARLSKAC |
| | PLNPRQRGFIRAAGCSENLKLLQTIIWSAKREHRPLGVVFVDIAKAFDTVSHQ |
| | HIIHALQQREVDPHIVGLVSNMYENISTYITTKRNTHTDKIQIRVGVKQGDPM |
| | SPLLFNLAMDPLLCKLEESGKGYHRGQSSITAMAFADDLVLLSDSWENMNTNI |
| | SILETFCNLTGLKTQGQKCHGFYIKPTKDSYTINDCAAWTINGTPLNMIDPGE |
| | SEKYLGLQFDPWIGIARSGLSTKLDFWLQRIDQAPLKPLQKTDILKTYTIPRL |
| | IYIADHSEVKTALLETLDQKIRTAVKEWLHLPPCTCDAILYSSTRDGGLGITK |
| | LAGLIPSVQARRLHRIAQSSDDTMKCFMEKEKMEQLHKKLWIQAGGDRENIPS |
| | IWEAPPSSEPPNNVSTNSEWEAPTQKDKFPKPCNWRKNEFKKWTKLASQGRGI |
| | VNFERDKISNHWIQYYRRIPHRKLLTALQLRANVYPTREFLARGRQDQYIKAC |
| | RHCDADIESCAHIIGNCPVTQDARIKRHNYICELLLEEAKKKDWVVFKEPHIR |
| | DSNKELYKPDLIFVKDARALVVDVTVRYEAAKSSLEEAAAEKVRKYKHLETEV |
| | RHLTNAKDVTFVGFPLGARGKWHQDNFKLLTELGLSKSRQVKMAETFSTVALF |
| | SSVDIVHMFASRARKSMVM (SEQ ID NO: 1670) |
| AAVS1 Left and | MGIHGVPAAMAERPFQCRICMRNFSYNWHLQRHIRTHTGEKPFACDICGRKFA |
| Right ZFP | RSDHLTTHTKIHTGSQKPFQCRICMRNFSHNYARDCHIRTHTGEKPFACDICG |
| (separated by XTEN | RKFAQNSTRIGHTKIHLRGSSGSETPGTSESATPESGIHGVPAAMAERPFQCR |
| linker) attached at | ICMRNFSQSSNLARHIRTHTGEKPFACDICGRKFARTDYLVDHTKIHTGSQKP |
| v2 location of DBD | FQCRICMRNFSYNTHLTRHIRTHTGEKPFACDICGRKFAQGYNLAGHTKIHLR |
| of R2Tg with XTEN | GSSGSETPGTSESATPESTATRDKKDTVTREKHPKKPFQKWMKDRAIKKGNYL |
| linker | RFQRLFYLDRGKLAKIILDDIECLSCDIPLSEIYSVFKTRWETTGSFKSLGDF |
| | KTYGKADNTAFRELITAKEIEKNVQEMSKGSAPGPDGITLGDVVKMDPEFSRT |
| | MEIFNLWLTTGKIPDMVRGCRTVLIPKSSKPDRLKDINNWRPITIGSILLRLF |
| | SRIVTARLSKACPLNPRQRGFIRAAGCSENLKLLQTIIWSAKREHRPLGVVFV |
| | DIAKAFDTVSHQHIIHALQQREVDPHIVGLVSNMYENISTYITTKRNTHTDKI |
| | QIRVGVKQGDPMSPLLFNLAMDPLLCKLEESGKGYHRGQSSITAMAFADDLVL |
| | LSDSWENMNTNISILETFCNLTGLKTQGQKCHGFYIKPTKDSYTINDCAAWTI |
| | NGTPLNMIDPGESEKYLGLQFDPWIGIARSGLSTKLDFWLQRIDQAPLKPLQK |
| | TDILKTYTIPRLIYIADHSEVKTALLETLDQKIRTAVKEWLHLPPCTCDAILY |
| | SSTRDGGLGITKLAGLIPSVQARRLHRIAQSSDDTMKCFMEKEKMEQLHKKLW |
| | IQAGGDRENIPSIWEAPPSSEPPNNVSTNSEWEAPTQKDKFPKPCNWRKNEFK |
| | KWTKLASQGRGIVNFERDKISNHWIQYYRRIPHRKLLTALQLRANVYPTREFL |
| | ARGRQDQYIKACRHCDADIESCAHIIGNCPVTQDARIKRHNYICELLLEEAKK |
| | KDWVVFKEPHIRDSNKELYKPDLIFVKDARALVVDVTVRYEAAKSSLEEAAAE |
| | KVRKYKHLETEVRHLTNAKDVTFVGFPLGARGKWHQDNFKLLTELGLSKSRQV |
| | KMAETFSTVALFSSVDIVHMFASRARKSMVM (SEQ ID NO: 1671) |
| AAVS1 Left ZFP | MGIHGVPAAMAERPFQCRICMRNFSYNWHLQRHIRTHTGEKPFACDICGRKFA |
| attached to N- | RSDHLTTHTKIHTGSQKPFQCRICMRNFSHNYARDCHIRTHTGEKPFACDICG |
| terminus of R2Tg | RKFAQNSTRIGHTRIHLRGSSGSETPGTSESATPESASCPKPGPPVSAGAMSL |
| with XTEN linker | ESGLTTHSVLAIERGPNSLANSGSDFGGGGLGLPLRLLRVSVGTQTSRSDWVD |
| | LVSWSHPGPTSKSQQVDLVSLFPKHRVDLLSKNDQVDLVAQFLPSKFPPNLAE |
| | NDLALLVNLEFYRSDLHVYECVHFAAHWEGLSGLPEVYEQLAPQPCVGETLHS |
| | SLPRDSELFVPEEGSSEKESEDAPKTSPPTPGKHGLEQTGEEKVMVTVPDKNP |
| | PCPCCGTRVNSVLNLIEHLKVSHGKRGVCFRCAKCGKENSNYHSVVCHFPKCR |
| | GPETEKAPAGEWICEVCNRDFTTKIGLGQHKRLAHPAVRNQERIVASQPKETS |
| | NRGAHKRCWTKEEEELLIRLEAQFEGNKNINKLIAEHITTKTAKQISDKRRLL |
| | SRKPAEEPREEPGTCHHTRRAAASLRTEPEMSHHAQAEDRDNGPGRRPLPGRA |
| | AAGGRTMDEIRRHPDKGNGQQRPTKQKSEEQLQAYYKKTLEERLSAGALNTFP |
| | RAFKQVMEGRDIKLVINQTAQDCFGCLESISQIRTATRDKKDTVTREKHPKKP |
| | FQKWMKDRAIKKGNYLRFQRLFYLDRGKLAKIILDDIECLSCDIPLSEIYSVF |
| | KTRWETTGSFKSLGDFKTYGKADNTAFRELITAKEIEKNVQEMSKGSAPGPDG |
| | ITLGDVVKMDPEFSRTMEIFNLWLTTGKIPDMVRGCRTVLIPKSSKPDRLKDI |
| | NNWRPITIGSILLRLFSRIVTARLSKACPLNPRQRGFIRAAGCSENLKLLQTI |
| | IWSAKREHRPLGVVFVDIAKAFDTVSHQHIIHALQQREVDPHIVGLVSNMYEN |
| | ISTYITTKRNTHTDKIQIRVGVKQGDPMSPLLFNLAMDPLLCKLEESGKGYHR |
| | GQSS1TAMAFADDLVLLSDSWENMNTNISILETFCNLTGLKTQGQKCHGFYIK |
| | PTKDSYTINDCAAWTINGTPLNMIDPGESEKYLGLQFDPWIGIARSGLSTKLD |
| | FWLQRIDQAPLKPLQKTDILKTYTIPRLIYIADHSEVKTALLETLDQKIRTAV |
| | KEWLHLPPCTCDAILYSSTRDGGLGITKLAGLIPSVQARRLHRIAQSSDDTMK |
| | CFMEKEKMEQLHKKLWIQAGGDRENIPSIWEAPPSSEPPNNVSTNSEWEAPTQ |
| | KDKFPKPCNWRKNEFKKWTKLASQGRGIVNFERDKISNHWIQYYRRIPHRKLL |
| | TALQLRANVYPTREFLARGRQDQYIKACRHCDADIESCAHIIGNCPVTQDARI |
| | KRHNYICELLLEEAKKKDWVVFKEPHIRDSNKELYKPDLIFVKDARALVVDVT |
| | VRYEAAKSSLEEAAAEKVRKYKHLETEVRHLTNAKDVTFVGFPLGARGKWHQD |
| | NFKLLTELGLSKSRQVKMAETFSTVALFSSVDIVHMFASRARKSMVM (SEQ |
| | ID NO: 1672) |
| AAVS1 Right ZFP | MGIHGVPAAMAERPFQCRICMRNFSQSSNLARHIRTHTGEKPFACDICGRKFA |
| attached to N- | RTDYLVDHTKIHTGSQKPFQCRICMRNFSYNTHLTRHIRTHTGEKPFACDICG |
| terminus of R2Tg | RKFAQGYNLAGHTKIHLRGSSGSETPGTSESATPESASCPKPGPPVSAGAMSL |
| with XTEN linker | ESGLTTHSVLAIERGPNSLANSGSDFGGGGLGLPLRLLRVSVGTQTSRSDWVD |
| | LVSWSHPGPTSKSQQVDLVSLFPKHRVDLLSKNDQVDLVAQFLPSKFPPNLAE |
| | NDLALLVNLEFYRSDLHVYECVHFAAHWEGLSGLPEVYEQLAPQPCVGETLHS |
| | SLPRDSELFVPEEGSSEKESEDAPKTSPPTPGKHGLEQTGEEKVMVTVPDKNP |
| | PCPCCGTRVNSVLNLIEHLKVSHGKRGVCFRCAKCGKENSNYHSVVCHFPKCR |
| | GPETEKAPAGEWICEVCNRDFTTKIGLGQHKRLAHPAVRNQERIVASQPKETS |
| | NRGAHKRCWTKEEEELLIRLEAQFEGNKNINKLIAEHITTKTAKQISDKRRLL |
| | SRKPAEEPREEPGTCHHTRRAAASLRTEPEMSHHAQAEDRDNGPGRRPLPGRA |
| | AAGGRTMDEIRRHPDKGNGQQRPTKQKSEEQLQAYYKKTLEERLSAGALNTFP |
| | RAFKQVMEGRDIKLVINQTAQDCFGCLESISQIRTATRDKKDTVTREKHPKKP |
| | FQKWMKDRAIKKGNYLRFQRLFYLDRGKLAKIILDDIECLSCDIPLSEIYSVF |
| | KTRWETTGSFKSLGDFKTYGKADNTAFRELITAKEIEKNVQEMSKGSAPGPDG |
| | ITLGDVVKMDPEFSRTMEIFNLWLTTGKIPDMVRGCRTVLIPKSSKPDRLKDI |
| | NNWRPITIGSILLRLFSRIVTARLSKACPLNPRQRGFIRAAGCSENLKLLQTI |
| | IWSAKREHRPLGVVFVDIAKAFDTVSHQHIIHALQQREVDPHIVGLVSNMYEN |
| | ISTYITTKRNTHTDKIQIRVGVKQGDPMSPLLFNLAMDPLLCKLEESGKGYHR |
| | GQSS1TAMAFADDLVLLSDSWENMNTNISILETFCNLTGLKTQGQKCHGFYIK |
| | PTKDSYTINDCAAWTINGTPLNMIDPGESEKYLGLQFDPWIGIARSGLSTKLD |
| | FWLQRIDQAPLKPLQKTDILKTYTIPRLIYIADHSEVKTALLETLDQKIRTAV |
| | KEWLHLPPCTCDAILYSSTRDGGLGITKLAGLIPSVQARRLHRIAQSSDDTMK |
| | CFMEKEKMEQLHKKLWIQAGGDRENIPSIWEAPPSSEPPNNVSTNSEWEAPTQ |
| | KDKFPKPCNWRKNEFKKWTKLASQGRGIVNFERDKISNHWIQYYRRIPHRKLL |
| | TALQLRANVYPTREFLARGRQDQYIKACRHCDADIESCAHIIGNCPVTQDARI |
| | KRHNYICELLLEEAKKKDWVVFKEPHIRDSNKELYKPDLIFVKDARALVVDVT |
| | VRYEAAKSSLEEAAAEKVRKYKHLETEVRHLTNAKDVTFVGFPLGARGKWHQD |
| | NFKLLTELGLSKSRQVKMAETFSTVALFSSVDIVHMFASRARKSMVM (SEQ |
| | ID NO: 1673) |
| AAVS1 Left and | MGIHGVPAAMAERPFQCRICMRNFSYNWHLQRHIRTHTGEKPFACDICGRKFA |
| Right ZFP attached | RSDHLTTHTKIHTGSQKPFQCRICMRNFSHNYARDCHIRTHTGEKPFACDICG |
| to N-terminus of | RKFAQNSTRIGHTKIHLRGSSGSETPGTSESATPESGIHGVPAAMAERPFQCR |
| R2Tg with XTEN | ICMRNFSQSSNLARHIRTHTGEKPFACDICGRKFARTDYLVDHTKIHTGSQKP |
| linker | FQCRICMRNFSYNTHLTRHIRTHTGEKPFACDICGRKFAQGYNLAGHTKIHLR |
| | GS [symbol] GSETPGTSESATPESASCPKPGPPVSAGAMSLESGLTTHSVLAIERGPNS |
| | LANSGSDFGGGGLGLPLRLLRVSVGTQTSRSDWVDLVSWSHPGPTSKSQQVDL |
| | VSLFPKHRVDLLSKNDQVDLVAQFLPSKFPPNLAENDLALLVNLEFYRSDLHV |
| | YECVHFAAHWEGLSGLPEVYEQLAPQPCVGETLHSSLPRDSELFVPEEGSSEK |
| | ESEDAPKTSPPTPGKHGLEQTGEEKVMVTVPDKNPPCPCCGTRVNSVLNLIEH |
| | LKVSHGKRGVCFRCAKCGKENSNYHSVVCHFPKCRGPETEKAPAGEWICEVCN |
| | RDFTTKIGLGQHKRLAHPAVRNQERIVASQPKETSNRGAHKRCWTKEEEELLI |
| | RLEAQFEGNKNINKLIAEHITTKTAKQISDKRRLLSRKPAEEPREEPGTCHHT |
| | RRAAASLRTEPEMSHHAQAEDRDNGPGRRPLPGRAAAGGRTMDEIRRHPDKGN |
| | GQQRPTKQKSEEQLQAYYKKTLEERLSAGALNTFPRAFKQVMEGRDIKLVINQ |
| | TAQDCFGCLESISQIRTATRDKKDTVTREKHPKKPFQKWMKDRAIKKGNYLRF |
| | QRLFYLDRGKLAKIILDDIECLSCDIPLSEIYSVFKTRWETTGSFKSLGDFKT |
| | YGKADNTAFRELITAKEIEKNVQEMSKGSAPGPDGITLGDVVKMDPEFSRTME |
| | IFNLWLTTGKIPDMVRGCRTVLIPKSSKPDRLKDINNWRPITIGSILLRLFSR |
| | IVTARLSKACPLNPRQRGFIRAAGCSENLKLLQTIIWSAKREHRPLGVVFVDI |
| | AKAFDTVSHQHIIHALQQREVDPHIVGLVSNMYENISTYITTKRNTHTDKIQI |
| | RVGVKQGDPMSPLLFNLAMDPLLCKLEESGKGYHRGQSSITAMAFADDLVLLS |
| | DSWENMNTNISILETFCNLTGLKTQGQKCHGFYIKPTKDSYTINDCAAWTING |
| | TPLNMIDPGESEKYLGLQFDPWIGIARSGLSTKLDFWLQRIDQAPLKPLQKTD |
| | ILKTYTIPRLIYIADHSEVKTALLETLDQKIRTAVKEWLHLPPCTCDAILYSS |
| | TRDGGLGITKLAGLIPSVQARRLHRIAQSSDDTMKCFMEKEKMEQLHKKLWIQ |
| | AGGDRENIPSIWEAPPSSEPPNNVSTNSEWEAPTQKDKFPKPCNWRKNEFKKW |
| | TKLASQGRGIVNFERDKISNHWIQYYRRIPHRKLLTALQLRANVYPTREFLAR |
| | GRQDQYIKACRHCDADIESCAHIIGNCPVTQDARIKRHNYICELLLEEAKKKD |
| | WVVFKEPHIRDSNKELYKPDLIFVKDARALVVDVTVRYEAAKSSLEEAAAEKV |
| | RKYKHLETEVRHLTNAKDVTFVGFPLGARGKWHQDNFKLLTELGLSKSRQVKM |
| | AETFSTVALFSSVDIVHMFASRARKSMVM (SEQ ID NO: 1674) |
| AAVS1 Left ZFP | MGIHGVPAAMAERPFQCRICMRNFSYNWHLQRHIRTHTGEKPFACDICGRKFA |
| attached to N- | RSDHLTTHTKIHTGSQKPFQCRICMRNFSHNYARDCHIRTHTGEKPFACDICG |
| terminus of R2Tg | RKFAQNSTRIGHTRIHLRGSSGSETPGTSESATPESASCPKPGPPVSAGAMSL |
| containing DBD | ESGLTTHSVLAIERGPNSLANSGSDFGGGGLGLPLRLLRVSVGTQTSRSDWVD |
| inactivation | LVSWSHPGPTSKSQQVDLVSLFPKHRVDLLSKNDQVDLVAQFLPSKFPPNLAE |
| mutations with | NDLALLVNLEFYRSDLHVYECVHFAAHWEGLSGLPEVYEQLAPQPCVGETLHS |
| XTEN linker | SLPRDSELFVPEEGSSEKESEDAPKTSPPTPGKHGLEQTGEEKVMVTVPDKNP |
| | PSPSSGTRVNSVLNLIEHLKVSHGKRGVCFRCAKCGKENSNYHSVVCHFPKCR |
| | GPETEKAPAGEWISEVSNRDFTTKIGLGQHKRLAHPAVRNQERIVASQPKETS |
| | NRGAHKACATKEEEELLIRLEAQFEGNKNINKLIAEHITTKTAKQISDKRRLL |
| | SRKPAEEPREEPGTCHHTRRAAASLRTEPEMSHHAQAEDRDNGPGRRPLPGRA |
| | AAGGRTMDEIRRHPDKGNGQQRPTKQKSEEQLQAYYKKTLEERLSAGALNTFP |
| | RAFKQVMEGRDIKLVINQTAQDCFGCLESISQIRTATRDKKDTVTREKHPKKP |
| | FQKWMKDRAIKKGNYLRFQRLFYLDRGKLAKIILDDIECLSCDIPLSEIYSVF |
| | KTRWETTGSFKSLGDFKTYGKADNTAFRELITAKEIEKNVQEMSKGSAPGPDG |
| | ITLGDVVKMDPEFSRTMEIFNLWLTTGKIPDMVRGCRTVLIPKSSKPDRLKDI |
| | NNWRPITIGSILLRLFSRIVTARLSKACPLNPRQRGFIRAAGCSENLKLLQTI |
| | IWSAKREHRPLGVVFVDIAKAFDTVSHQHIIHALQQREVDPHIVGLVSNMYEN |
| | ISTYITTKRNTHTDKIQIRVGVKQGDPMSPLLFNLAMDPLLCKLEESGKGYHR |
| | GQSS1TAMAFADDLVLLSDSWENMNTNISILETFCNLTGLKTQGQKCHGFYIK |
| | PTKDSYTINDCAAWTINGTPLNMIDPGESEKYLGLQFDPWIGIARSGLSTKLD |
| | FWLQRIDQAPLKPLQKTDILKTYTIPRLIYIADHSEVKTALLETLDQKIRTAV |
| | KEWLHLPPCTCDAILYSSTRDGGLGITKLAGLIPSVQARRLHRIAQSSDDTMK |
| | CFMEKEKMEQLHKKLWIQAGGDRENIPSIWEAPPSSEPPNNVSTNSEWEAPTQ |
| | KDKFPKPCNWRKNEFKKWTKLASQGRGIVNFERDKISNHWIQYYRRIPHRKLL |
| | TALQLRANVYPTREFLARGRQDQYIKACRHCDADIESCAHIIGNCPVTQDARI |
| | KRHNYICELLLEEAKKKDWVVFKEPHIRDSNKELYKPDLIFVKDARALVVDVT |
| | VRYEAAKSSLEEAAAEKVRKYKHLETEVRHLTNAKDVTFVGFPLGARGKWHQD |
| | NFKLLTELGLSKSRQVKMAETFSTVALFSSVDIVHMFASRARKSMVM (SEQ |
| | ID NO: 1675) |
| AAVS1 Right ZFP | MGIHGVPAAMAERPFQCRICMRNFSQSSNLARHIRTHTGEKPFACDICGRKFA |
| attached to N- | RTDYLVDHTKIHTGSQKPFQCRICMRNFSYNTHLTRHIRTHTGEKPFACDICG |
| terminus of R2Tg | RKFAQGYNLAGHTKIHLRGSSGSETPGTSESATPESASCPKPGPPVSAGAMSL |
| containing DBD | ESGLTTHSVLAIERGPNSLANSGSDFGGGGLGLPLRLLRVSVGTQTSRSDWVD |
| inactivation | LVSWSHPGPTSKSQQVDLVSLFPKHRVDLLSKNDQVDLVAQFLPSKFPPNLAE |
| mutations with | NDLALLVNLEFYRSDLHVYECVHFAAHWEGLSGLPEVYEQLAPQPCVGETLHS |
| XTEN linker | SLPRDSELFVPEEGSSEKESEDAPKTSPPTPGKHGLEQTGEEKVMVTVPDKNP |
| | PSPSSGTRVNSVLNLIEHLKVSHGKRGVCFRCAKCGKENSNYHSVVCHFPKCR |
| | GPETEKAPAGEWISEVSNRDFTTKIGLGQHKRLAHPAVRNQERIVASQPKETS |
| | NRGAHKACATKEEEELLIRLEAQFEGNKNINKLIAEHITTKTAKQISDKRRLL |
| | SRKPAEEPREEPGTCHHTRRAAASLRTEPEMSHHAQAEDRDNGPGRRPLPGRA |
| | AAGGRTMDEIRRHPDKGNGQQRPTKQKSEEQLQAYYKKTLEERLSAGALNTFP |
| | RAFKQVMEGRDIKLVINQTAQDCFGCLESISQIRTATRDKKDTVTREKHPKKP |
| | FQKWMKDRAIKKGNYLRFQRLFYLDRGKLAKIILDDIECLSCDIPLSEIYSVF |
| | KTRWETTGSFKSLGDFKTYGKADNTAFRELITAKEIEKNVQEMSKGSAPGPDG |
| | ITLGDVVKMDPEFSRTMEIFNLWLTTGKIPDMVRGCRTVLIPKSSKPDRLKDI |
| | NNWRPITIGSILLRLFSRIVTARLSKACPLNPRQRGFIRAAGCSENLKLLQTI |
| | IWSAKREHRPLGVVFVDIAKAFDTVSHQHIIHALQQREVDPHIVGLVSNMYEN |
| | ISTYITTKRNTHTDKIQIRVGVKQGDPMSPLLFNLAMDPLLCKLEESGKGYHR |
| | GQSS1TAMAFADDLVLLSDSWENMNTNISILETFCNLTGLKTQGQKCHGFYIK |
| | PTKDSYTINDCAAWTINGTPLNMIDPGESEKYLGLQFDPWIGIARSGLSTKLD |
| | FWLQRIDQAPLKPLQKTDILKTYTIPRLIYIADHSEVKTALLETLDQKIRTAV |
| | KEWLHLPPCTCDAILYSSTRDGGLGITKLAGLIPSVQARRLHRIAQSSDDTMK |
| | CFMEKEKMEQLHKKLWIQAGGDRENIPSIWEAPPSSEPPNNVSTNSEWEAPTQ |
| | KDKFPKPCNWRKNEFKKWTKLASQGRGIVNFERDKISNHWIQYYRRIPHRKLL |
| | TALQLRANVYPTREFLARGRQDQYIKACRHCDADIESCAHIIGNCPVTQDARI |
| | KRHNYICELLLEEAKKKDWVVFKEPHIRDSNKELYKPDLIFVKDARALVVDVT |
| | VRYEAAKSSLEEAAAEKVRKYKHLETEVRHLTNAKDVTFVGFPLGARGKWHQD |
| | NFKLLTELGLSKSRQVKMAETFSTVALFSSVDIVHMFASRARKSMVM (SEQ |
| | ID NO: 1676) |
| AAVS1 Left and | MGIHGVPAAMAERPFQCRICMRNFSYNWHLQRHIRTHTGEKPFACDICGRKFA |
| Right ZFP attached | RSDHLTTHTKIHTGSQKPFQCRICMRNFSHNYARDCHIRTHTGEKPFACDICG |
| to N-terminus of | RKFAQNSTRIGHTKIHLRGSSGSETPGTSESATPESGIHGVPAAMAERPFQCR |
| R2Tg containing | ICMRNFSQSSNLARHIRTHTGEKPFACDICGRKFARTDYLVDHTKIHTGSQKP |
| DBD inactivation | FQCRICMRNFSYNTHLTRHIRTHTGEKPFACDICGRKFAQGYNLAGHTKIHLR |
| mutations with | GSSGSETPGTSESATPESASCPKPGPPVSAGAMSLESGLTTHSVLAIERGPNS |
| XTEN linker | LANSGSDFGGGGLGLPLRLLRVSVGTQTSRSDWVDLVSWSHPGPTSKSQQVDL |
| | VSLFPKHRVDLLSKNDQVDLVAQFLPSKFPPNLAENDLALLVNLEFYRSDLHV |
| | YECVHFAAHWEGLSGLPEVYEQLAPQPCVGETLHSSLPRDSELFVPEEGSSEK |
| | ESEDAPKTSPPTPGKHGLEQTGEEKVMVTVPDKNPPSPSSGTRVNSVLNLIEH |
| | LKVSHGKRGVCFRCAKCGKENSNYHSVVCHFPKCRGPETEKAPAGEWISEVSN |
| | RDFTTKIGLGQHKRLAHPAVRNQERIVASQPKETSNRGAHKACATKEEEELLI |
| | RLEAQFEGNKNINKLIAEHITTKTAKQISDKRRLLSRKPAEEPREEPGTCHHT |
| | RRAAASLRTEPEMSHHAQAEDRDNGPGRRPLPGRAAAGGRTMDEIRRHPDKGN |
| | GQQRPTKQKSEEQLQAYYKKTLEERLSAGALNTFPRAFKQVMEGRDIKLVINQ |
| | TAQDCFGCLESISQIRTATRDKKDTVTREKHPKKPFQKWMKDRAIKKGNYLRF |
| | QRLFYLDRGKLAKIILDDIECLSCDIPLSEIYSVFKTRWETTGSFKSLGDFKT |
| | YGKADNTAFRELITAKEIEKNVQEMSKGSAPGPDGITLGDVVKMDPEFSRTME |
| | IFNLWLTTGKIPDMVRGCRTVLIPKSSKPDRLKDINNWRPITIGSILLRLFSR |
| | IVTARLSKACPLNPRQRGFIRAAGCSENLKLLQTIIWSAKREHRPLGVVFVDI |
| | AKAFDTVSHQHIIHALQQREVDPHIVGLVSNMYENISTYITTKRNTHTDKIQI |
| | RVGVKQGDPMSPLLFNLAMDPLLCKLEESGKGYHRGQSSITAMAFADDLVLLS |
| | DSWENMNTNISILETFCNLTGLKTQGQKCHGFYIKPTKDSYTINDCAAWTING |
| | TPLNMIDPGESEKYLGLQFDPWIGIARSGLSTKLDFWLQRIDQAPLKPLQKTD |
| | ILKTYTIPRLIYIADHSEVKTALLETLDQKIRTAVKEWLHLPPCTCDAILYSS |
| | TRDGGLGITKLAGLIPSVQARRLHRIAQSSDDTMKCFMEKEKMEQLHKKLWIQ |
| | AGGDRENIPSIWEAPPSSEPPNNVSTNSEWEAPTQKDKFPKPCNWRKNEFKKW |
| | TKLASQGRGIVNFERDKISNHWIQYYRRIPHRKLLTALQLRANVYPTREFLAR |
| | GRQDQYIKACRHCDADIESCAHIIGNCPVTQDARIKRHNYICELLLEEAKKKD |
| | WVVFKEPHIRDSNKELYKPDLIFVKDARALVVDVTVRYEAAKSSLEEAAAEKV |
| | RKYKHLETEVRHLTNAKDVTFVGFPLGARGKWHQDNFKLLTELGLSKSRQVKM |
| | AETFSTVALFSSVDIVHMFASRARKSMVM (SEQ ID NO: 1677) |
| S. pyogenes Cas9 | MAPKKKRKVGIHGVPAADKKYSIGLDIGTNSVGWAVITDEYKVPSKKFKVLGN |
| attached at v2 | TDRHSIKKNLIGALLFDSGETAEATRLKRTARRRYTRRKNRICYLQEIFSNEM |
| location of DBD of | AKVDDSFFHRLEESFLVEEDKKHERHPIFGNIVDEVAYHEKYPTIYHLRKKLV |
| R2Tg with | DSTDKADLRLIYLALAHMIKFRGHFLIEGDLNPDNSDVDKLFIQLVQTYNQLF |
| XTEN33aa linker | EENPINASGVDAKAILSARLSKSRRLENLIAQLPGEKKNGLFGNLIALSLGLT |
| | PNFKSNFDLAEDAKLQLSKDTYDDDLDNLLAQIGDQYADLFLAAKNLSDAILL |
| | SDILRVNTEITKAPLSASMIKRYDEHHQDLTLLKALVRQQLPEKYKEIFFDQS |
| | KNGYAGYIDGGASQEEFYKFIKPILEKMDGTEELLVKLNREDLLRKQRTFDNG |
| | SIPHQIHLGELHAILRRQEDFYPFLKDNREKIEKILTFRIPYYVGPLARGNSR |
| | FAWMTRKSEETITPWNFEEVVDKGASAQSFIERMTNFDKNLPNEKVLPKHSLL |
| | YEYFTVYNELTKVKYVTEGMRKPAFLSGEQKKAIVDLLFKTNRKVTVKQLKED |
| | YFKKIECFDSVEISGVEDRFNASLGTYHDLLKIIKDKDFLDNEENEDILEDIV |
| | LTLTLFEDREMIEERLKTYAHLFDDKVMKQLKRRRYTGWGRLSRKLINGIRDK |
| | QSGKTILDFLKSDGFANRNFMQLIHDDSLTFKEDIQKAQVSGQGDSLHEHIAN |
| | LAGSPAIKKGILQTVKVVDELVKVMGRHKPENIVIEMARENQTTQKGQKNSRE |
| | RMKRIEEGIKELGSQILKEHPVENTQLQNEKLYLYYLQNGRDMYVDQELDINR |
| | LSDYDVDAIVPQSFLKDDSIDNKVLTRSDKNRGKSDNVPSEEVVKKMKNYWRQ |
| | LLNAKLITQRKFDNLTKAERGGLSELDKAGFIKRQLVETRQITKHVAQILDSR |
| | MNTKYDENDKLIREVKVITLKSKLVSDFRKDFQFYKVREINNYHHAHDAYLNA |
| | VVGTALIKKYPKLESEFVYGDYKVYDVRKMIAKSEQEIGKATAKYFFYSNIMN |
| | FFKTEITLANGEIRKRPLIETNGETGEIVWDKGRDFATVRKVLSMPQVNIVKK |
| | TEVQTGGFSKESILPKRNSDKLIARKKDWDPKKYGGFDSPTVAYSVLVVAKVE |
| | KGKSKKLKSVKELLGITIMERSSFEKNPIDFLEAKGYKEVKKDLIIKLPKYSL |
| | FELENGRKRMLASAGELQKGNELALPSKYVNFLYLASHYEKLKGSPEDNEQKQ |
| | LFVEQHKHYLDEIIEQISEFSKRVILADANLDKVLSAYNKHRDKPIREQAENI |
| | IHLFTLTNLGAPAAFKYFDTTIDRKRYTSTKEVLDATLIHQSITGLYETRIDL |
| | SQLGGDSGGSSGGSSGSETPGTSESATPESSGGSSGGSSTATRDKKDTVTREK |
| | HPKKPFQKWMKDRAIKKGNYLRFQRLFYLDRGKLAKIILDDIECLSCDIPLSE |
| | IYSVFKTRWETTGSFKSLGDFKTYGKADNTAFRELITAKEIEKNVQEMSKGSA |
| | PGPDGITLGDVVKMDPEFSRTMEIFNLWLTTGKIPDMVRGCRTVLIPKSSKPD |
| | RLKDINNWRPITIGSILLRLFSRIVTARLSKACPLNPRQRGFIRAAGCSENLK |
| | LLQTIIWSAKREHRPLGVVFVDIAKAFDTVSHQHIIHALQQREVDPHIVGLVS |
| | NMYENISTYITTKRNTHTDKIQIRVGVKQGDPMSPLLFNLAMDPLLCKLEESG |
| | KGYHRGQSSITAMAFADDLVLLSDSWENMNTNISILETFCNLTGLKTQGQKCH |
| | GFYIKPTKDSYTINDCAAWTINGTPLNMIDPGESEKYLGLQFDPWIGIARSGL |
| | STKLDFWLQRIDQAPLKPLQKTDILKTYTIPRLIYIADHSEVKTALLETLDQK |
| | IRTAVKEWLHLPPCTCDAILYSSTRDGGLGITKLAGLIPSVQARRLHRIAQSS |
| | DDTMKCFMEKEKMEQLHKKLWIQAGGDRENIPSIWEAPPSSEPPNNVSTNSEW |
| | EAPTQKDKFPKPCNWRKNEFKKWTKLASQGRGIVNFERDKISNHWIQYYRRIP |
| | HRKLLTALQLRANVYPTREFLARGRQDQYIKACRHCDADIESCAHIIGNCPVT |
| | QDARIKRHNYICELLLEEAKKKDWVVFKEPHIRDSNKELYKPDLIFVKDARAL |
| | VVDVTVRYEAAKSSLEEAAAEKVRKYKHLETEVRHLTNAKDVTFVGFPLGARG |
| | KWHQDNFKLLTELGLSKSRQVKMAETFSTVALFSSVDIVHMFASRARKSMVM |
| | (SEQ ID NO: 1678) |
| S. pyogenes Cas9 | MAPKKKRKVGIHGVPAADKKYSIGLAIGTNSVGWAVITDEYKVPSKKFKVLGN |
| containing catalytic | TDRHSIKKNLIGALLFDSGETAEATRLKRTARRRYTRRKNRICYLQEIFSNEM |
| mutations (dCas9) | AKVDDSFFHRLEESFLVEEDKKHERHPIFGNIVDEVAYHEKYPTIYHLRKKLV |
| attached at v2 | DSTDKADLRLIYLALAHMIKFRGHFLIEGDLNPDNSDVDKLFIQLVQTYNQLF |
| location of DBD of | EENPINASGVDAKAILSARLSKSRRLENLIAQLPGEKKNGLFGNLIALSLGLT |
| R2Tg with | PNFKSNFDLAEDAKLQLSKDTYDDDLDNLLAQIGDQYADLFLAAKNLSDAILL |
| XTEN33aa linker | SDILRVNTEITKAPLSASMIKRYDEHHQDLTLLKALVRQQLPEKYKEIFFDQS |
| | KNGYAGYIDGGASQEEFYKFIKPILEKMDGTEELLVKLNREDLLRKQRTFDNG |
| | SIPHQIHLGELHAILRRQEDFYPFLKDNREKIEKILTFRIPYYVGPLARGNSR |
| | FAWMTRKSEETITPWNFEEVVDKGASAQSFIERMTNFDKNLPNEKVLPKHSLL |
| | YEYFTVYNELTKVKYVTEGMRKPAFLSGEQKKAIVDLLFKTNRKVTVKQLKED |
| | YFKKIECFDSVEISGVEDRFNASLGTYHDLLKIIKDKDFLDNEENEDILEDIV |
| | LTLTLFEDREMIEERLKTYAHLFDDKVMKQLKRRRYTGWGRLSRKLINGIRDK |
| | QSGKTILDFLKSDGFANRNFMQLIHDDSLTFKEDIQKAQVSGQGDSLHEHIAN |
| | LAGSPAIKKGILQTVKVVDELVKVMGRHKPENIVIEMARENQTTQKGQKNSRE |
| | RMKRIEEGIKELGSQILKEHPVENTQLQNEKLYLYYLQNGRDMYVDQELDINR |
| | LSDYDVDAIVPQSFLKDDSIDNKVLTRSDKNRGKSDNVPSEEVVKKMKNYWRQ |
| | LLNAKLITQRKFDNLTKAERGGLSELDKAGFIKRQLVETRQITKHVAQILDSR |
| | MNTKYDENDKLIREVKVITLKSKLVSDFRKDFQFYKVREINNYHHAHDAYLNA |
| | VVGTALIKKYPKLESEFVYGDYKVYDVRKMIAKSEQEIGKATAKYFFYSNIMN |
| | FFKTEITLANGEIRKRPLIETNGETGEIVWDKGRDFATVRKVLSMPQVNIVKK |
| | TEVQTGGFSKESILPKRNSDKLIARKKDWDPKKYGGFDSPTVAYSVLVVAKVE |
| | KGKSKKLKSVKELLGITIMERSSFEKNPIDFLEAKGYKEVKKDLIIKLPKYSL |
| | FELENGRKRMLASAGELQKGNELALPSKYVNFLYLASHYEKLKGSPEDNEQKQ |
| | LFVEQHKHYLDEIIEQISEFSKRVILADANLDKVLSAYNKHRDKPIREQAENI |
| | IHLFTLTNLGAPAAFKYFDTTIDRKRYTSTKEVLDATLIHQSITGLYETRIDL |
| | SQLGGDSGGSSGGSSGSETPGTSESATPESSGGSSGGSSTATRDKKDTVTREK |
| | HPKKPFQKWMKDRAIKKGNYLRFQRLFYLDRGKLAKIILDDIECLSCDIPLSE |
| | IYSVFKTRWETTGSFKSLGDFKTYGKADNTAFRELITAKEIEKNVQEMSKGSA |
| | PGPDGITLGDVVKMDPEFSRTMEIFNLWLTTGKIPDMVRGCRTVLIPKSSKPD |
| | RLKDINNWRPITIGSILLRLFSRIVTARLSKACPLNPRQRGFIRAAGCSENLK |
| | LLQTIIWSAKREHRPLGVVFVDIAKAFDTVSHQHIIHALQQREVDPHIVGLVS |
| | NMYENISTYITTKRNTHTDKIQIRVGVKQGDPMSPLLFNLAMDPLLCKLEESG |
| | KGYHRGQSSITAMAFADDLVLLSDSWENMNTNISILETFCNLTGLKTQGQKCH |
| | GFYIKPTKDSYTINDCAAWTINGTPLNMIDPGESEKYLGLQFDPWIGIARSGL |
| | STKLDFWLQRIDQAPLKPLQKTDILKTYTIPRLIYIADHSEVKTALLETLDQK |
| | IRTAVKEWLHLPPCTCDAILYSSTRDGGLGITKLAGLIPSVQARRLHRIAQSS |
| | DDTMKCFMEKEKMEQLHKKLWIQAGGDRENIPSIWEAPPSSEPPNNVSTNSEW |
| | EAPTQKDKFPKPCNWRKNEFKKWTKLASQGRGIVNFERDKISNHWIQYYRRIP |
| | HRKLLTALQLRANVYPTREFLARGRQDQYIKACRHCDADIESCAHIIGNCPVT |
| | QDARIKRHNYICELLLEEAKKKDWVVFKEPHIRDSNKELYKPDLIFVKDARAL |
| | VVDVTVRYEAAKSSLEEAAAEKVRKYKHLETEVRHLTNAKDVTFVGFPLGARG |
| | KWHQDNFKLLTELGLSKSRQVKMAETFSTVALFSSVDIVHMFASRARKSMVM |
| | (SEQ ID NO: 1679) |
| S. pyogenes Cas9 | MAPKKKRKVGIHGVPAADKKYSIGLAIGTNSVGWAVITDEYKVPSKKFKVLGN |
| D10A nickase | TDRHSIKKNLIGALLFDSGETAEATRLKRTARRRYTRRKNRICYLQEIFSNEM |
| mutant attached at | AKVDDSFFHRLEESFLVEEDKKHERHPIFGNIVDEVAYHEKYPTIYHLRKKLV |
| v2 location of DBD | DSTDKADLRLIYLALAHMIKFRGHFLIEGDLNPDNSDVDKLFIQLVQTYNQLF |
| of R2Tg with | EENPINASGVDAKAILSARLSKSRRLENLIAQLPGEKKNGLFGNLIALSLGLT |
| XTEN33aa linker | PNFKSNFDLAEDAKLQLSKDTYDDDLDNLLAQIGDQYADLFLAAKNLSDAILL |
| | SDILRVNTEITKAPLSASMIKRYDEHHQDLTLLKALVRQQLPEKYKEIFFDQS |
| | KNGYAGYIDGGASQEEFYKFIKPILEKMDGTEELLVKLNREDLLRKQRTFDNG |
| | SIPHQIHLGELHAILRRQEDFYPFLKDNREKIEKILTFRIPYYVGPLARGNSR |
| | FAWMTRKSEETITPWNFEEVVDKGASAQSFIERMTNFDKNLPNEKVLPKHSLL |
| | YEYFTVYNELTKVKYVTEGMRKPAFLSGEQKKAIVDLLFKTNRKVTVKQLKED |
| | YFKKIECFDSVEISGVEDRFNASLGTYHDLLKIIKDKDFLDNEENEDILEDIV |
| | LTLTLFEDREMIEERLKTYAHLFDDKVMKQLKRRRYTGWGRLSRKLINGIRDK |
| | QSGKTILDFLKSDGFANRNFMQLIHDDSLTFKEDIQKAQVSGQGDSLHEHIAN |
| | LAGSPAIKKGILQTVKVVDELVKVMGRHKPENIVIEMARENQTTQKGQKNSRE |
| | RMKRIEEGIKELGSQILKEHPVENTQLQNEKLYLYYLQNGRDMYVDQELDINR |
| | LSDYDVDHIVPQSFLKDDSIDNKVLTRSDKNRGKSDNVPSEEVVKKMKNYWRQ |
| | LLNAKLITQRKFDNLTKAERGGLSELDKAGFIKRQLVETRQITKHVAQILDSR |
| | MNTKYDENDKLIREVKVITLKSKLVSDFRKDFQFYKVREINNYHHAHDAYLNA |
| | VVGTALIKKYPKLESEFVYGDYKVYDVRKMIAKSEQEIGKATAKYFFYSNIMN |
| | FFKTEITLANGEIRKRPLIETNGETGEIVWDKGRDFATVRKVLSMPQVNIVKK |
| | TEVQTGGFSKESILPKRNSDKLIARKKDWDPKKYGGFDSPTVAYSVLVVAKVE |
| | KGKSKKLKSVKELLGITIMERSSFEKNPIDFLEAKGYKEVKKDLIIKLPKYSL |
| | FELENGRKRMLASAGELQKGNELALPSKYVNFLYLASHYEKLKGSPEDNEQKQ |
| | LFVEQHKHYLDEIIEQISEFSKRVILADANLDKVLSAYNKHRDKPIREQAENI |
| | IHLFTLTNLGAPAAFKYFDTTIDRKRYTSTKEVLDATLIHQSITGLYETRIDL |
| | SQLGGDSGGSSGGSSGSETPGTSESATPESSGGSSGGSSTATRDKKDTVTREK |
| | HPKKPFQKWMKDRAIKKGNYLRFQRLFYLDRGKLAKIILDDIECLSCDIPLSE |
| | IYSVFKTRWETTGSFKSLGDFKTYGKADNTAFRELITAKEIEKNVQEMSKGSA |
| | PGPDGITLGDVVKMDPEFSRTMEIFNLWLTTGKIPDMVRGCRTVLIPKSSKPD |
| | RLKDINNWRPITIGSILLRLFSRIVTARLSKACPLNPRQRGFIRAAGCSENLK |
| | LLQTIIWSAKREHRPLGVVFVDIAKAFDTVSHQHIIHALQQREVDPHIVGLVS |
| | NMYENISTYITTKRNTHTDKIQIRVGVKQGDPMSPLLFNLAMDPLLCKLEESG |
| | KGYHRGQSSITAMAFADDLVLLSDSWENMNTNISILETFCNLTGLKTQGQKCH |
| | GFYIKPTKDSYTINDCAAWTINGTPLNMIDPGESEKYLGLQFDPWIGIARSGL |
| | STKLDFWLQRIDQAPLKPLQKTDILKTYTIPRLIYIADHSEVKTALLETLDQK |
| | IRTAVKEWLHLPPCTCDAILYSSTRDGGLGITKLAGLIPSVQARRLHRIAQSS |
| | DDTMKCFMEKEKMEQLHKKLWIQAGGDRENIPSIWEAPPSSEPPNNVSTNSEW |
| | EAPTQKDKFPKPCNWRKNEFKKWTKLASQGRGIVNFERDKISNHWIQYYRRIP |
| | HRKLLTALQLRANVYPTREFLARGRQDQYIKACRHCDADIESCAHIIGNCPVT |
| | QDARIKRHNYICELLLEEAKKKDWVVFKEPHIRDSNKELYKPDLIFVKDARAL |
| | VVDVTVRYEAAKSSLEEAAAEKVRKYKHLETEVRHLTNAKDVTFVGFPLGARG |
| | KWHQDNFKLLTELGLSKSRQVKMAETFSTVALFSSVDIVHMFASRARKSMVM |
| | (SEQ ID NO: 1680) |
| S. pyogenes Cas9 | MAPKKKRKVGIHGVPAADKKYSIGLDIGTNSVGWAVITDEYKVPSKKFKVLGN |
| N863A nickase | TDRHSIKKNLIGALLFDSGETAEATRLKRTARRRYTRRKNRICYLQEIFSNEM |
| mutant attached at | AKVDDSFFHRLEESFLVEEDKKHERHPIFGNIVDEVAYHEKYPTIYHLRKKLV |
| v2 location of DBD | DSTDKADLRLIYLALAHMIKFRGHFLIEGDLNPDNSDVDKLFIQLVQTYNQLF |
| of R2Tg with | EENPINASGVDAKAILSARLSKSRRLENLIAQLPGEKKNGLFGNLIALSLGLT |
| XTEN33aa linker | PNFKSNFDLAEDAKLQLSKDTYDDDLDNLLAQIGDQYADLFLAAKNLSDAILL |
| | SDILRVNTEITKAPLSASMIKRYDEHHQDLTLLKALVRQQLPEKYKEIFFDQS |
| | KNGYAGYIDGGASQEEFYKFIKPILEKMDGTEELLVKLNREDLLRKQRTFDNG |
| | SIPHQIHLGELHAILRRQEDFYPFLKDNREKIEKILTFRIPYYVGPLARGNSR |
| | FAWMTRKSEETITPWNFEEVVDKGASAQSFIERMTNFDKNLPNEKVLPKHSLL |
| | YEYFTVYNELTKVKYVTEGMRKPAFLSGEQKKAIVDLLFKTNRKVTVKQLKED |
| | YFKKIECFDSVEISGVEDRFNASLGTYHDLLKIIKDKDFLDNEENEDILEDIV |
| | LTLTLFEDREMIEERLKTYAHLFDDKVMKQLKRRRYTGWGRLSRKLINGIRDK |
| | QSGKTILDFLKSDGFANRNFMQLIHDDSLTFKEDIQKAQVSGQGDSLHEHIAN |
| | LAGSPAIKKGILQTVKVVDELVKVMGRHKPENIVIEMARENQTTQKGQKNSRE |
| | RMKRIEEGIKELGSQILKEHPVENTQLQNEKLYLYYLQNGRDMYVDQELDINR |
| | LSDYDVDHIVPQSFLKDDSIDNKVLTRSDKARGKSDNVPSEEVVKKMKNYWRQ |
| | LLNAKLITQRKFDNLTKAERGGLSELDKAGFIKRQLVETRQITKHVAQILDSR |
| | MNTKYDENDKLIREVKVITLKSKLVSDFRKDFQFYKVREINNYHHAHDAYLNA |
| | VVGTALIKKYPKLESEFVYGDYKVYDVRKMIAKSEQEIGKATAKYFFYSNIMN |
| | FFKTEITLANGEIRKRPLIETNGETGEIVWDKGRDFATVRKVLSMPQVNIVKK |
| | TEVQTGGFSKESILPKRNSDKLIARKKDWDPKKYGGFDSPTVAYSVLVVAKVE |
| | KGKSKKLKSVKELLGITIMERSSFEKNPIDFLEAKGYKEVKKDLIIKLPKYSL |
| | FELENGRKRMLASAGELQKGNELALPSKYVNFLYLASHYEKLKGSPEDNEQKQ |
| | LFVEQHKHYLDEIIEQISEFSKRVILADANLDKVLSAYNKHRDKPIREQAENI |
| | IHLFTLTNLGAPAAFKYFDTTIDRKRYTSTKEVLDATLIHQSITGLYETRIDL |
| | SQLGGDSGGSSGGSSGSETPGTSESATPESSGGSSGGSSTATRDKKDTVTREK |
| | HPKKPFQKWMKDRAIKKGNYLRFQRLFYLDRGKLAKIILDDIECLSCDIPLSE |
| | IYSVFKTRWETTGSFKSLGDFKTYGKADNTAFRELITAKEIEKNVQEMSKGSA |
| | PGPDGITLGDVVKMDPEFSRTMEIFNLWLTTGKIPDMVRGCRTVLIPKSSKPD |
| | RLKDINNWRPITIGSILLRLFSRIVTARLSKACPLNPRQRGFIRAAGCSENLK |
| | LLQTIIWSAKREHRPLGVVFVDIAKAFDTVSHQHIIHALQQREVDPHIVGLVS |
| | NMYENISTYITTKRNTHTDKIQIRVGVKQGDPMSPLLFNLAMDPLLCKLEESG |
| | KGYHRGQSSITAMAFADDLVLLSDSWENMNTNISILETFCNLTGLKTQGQKCH |
| | GFYIKPTKDSYTINDCAAWTINGTPLNMIDPGESEKYLGLQFDPWIGIARSGL |
| | STKLDFWLQRIDQAPLKPLQKTDILKTYTIPRLIYIADHSEVKTALLETLDQK |
| | IRTAVKEWLHLPPCTCDAILYSSTRDGGLGITKLAGLIPSVQARRLHRIAQSS |
| | DDTMKCFMEKEKMEQLHKKLWIQAGGDRENIPSIWEAPPSSEPPNNVSTNSEW |
| | EAPTQKDKFPKPCNWRKNEFKKWTKLASQGRGIVNFERDKISNHWIQYYRRIP |
| | HRKLLTALQLRANVYPTREFLARGRQDQYIKACRHCDADIESCAHIIGNCPVT |
| | QDARIKRHNYICELLLEEAKKKDWVVFKEPHIRDSNKELYKPDLIFVKDARAL |
| | VVDVTVRYEAAKSSLEEAAAEKVRKYKHLETEVRHLTNAKDVTFVGFPLGARG |
| | KWHQDNFKLLTELGLSKSRQVKMAETFSTVALFSSVDIVHMFASRARKSMVM |
| | (SEQ ID NO: 1681) |
| S. pyogenes Cas9 | MAPKKKRKVGIHGVPAADKKYSIGLAIGTNSVGWAVITDEYKVPSKKFKVLGN |
| D10A nickase | TDRHSIKKNLIGALLFDSGETAEATRLKRTARRRYTRRKNRICYLQEIFSNEM |
| mutant attached at | AKVDDSFFHRLEESFLVEEDKKHERHPIFGNIVDEVAYHEKYPTIYHLRKKLV |
| v2 location of DBD | DSTDKADLRLIYLALAHMIKFRGHFLIEGDLNPDNSDVDKLFIQLVQTYNQLF |
| of R2Tg containing | EENPINASGVDAKAILSARLSKSRRLENLIAQLPGEKKNGLFGNLIALSLGLT |
| EN mutation with | PNFKSNFDLAEDAKLQLSKDTYDDDLDNLLAQIGDQYADLFLAAKNLSDAILL |
| XTEN33aa linker | SDILRVNTEITKAPLSASMIKRYDEHHQDLTLLKALVRQQLPEKYKEIFFDQS |
| | KNGYAGYIDGGASQEEFYKFIKPILEKMDGTEELLVKLNREDLLRKQRTFDNG |
| | SIPHQIHLGELHAILRRQEDFYPFLKDNREKIEKILTFRIPYYVGPLARGNSR |
| | FAWMTRKSEETITPWNFEEVVDKGASAQSFIERMTNFDKNLPNEKVLPKHSLL |
| | YEYFTVYNELTKVKYVTEGMRKPAFLSGEQKKAIVDLLFKTNRKVTVKQLKED |
| | YFKKIECFDSVEISGVEDRFNASLGTYHDLLKIIKDKDFLDNEENEDILEDIV |
| | LTLTLFEDREMIEERLKTYAHLFDDKVMKQLKRRRYTGWGRLSRKLINGIRDK |
| | QSGKTILDFLKSDGFANRNFMQLIHDDSLTFKEDIQKAQVSGQGDSLHEHIAN |
| | LAGSPAIKKGILQTVKVVDELVKVMGRHKPENIVIEMARENQTTQKGQKNSRE |
| | RMKRIEEGIKELGSQILKEHPVENTQLQNEKLYLYYLQNGRDMYVDQELDINR |
| | LSDYDVDHIVPQSFLKDDSIDNKVLTRSDKNRGKSDNVPSEEVVKKMKNYWRQ |
| | LLNAKLITQRKFDNLTKAERGGLSELDKAGFIKRQLVETRQITKHVAQILDSR |
| | MNTKYDENDKLIREVKVITLKSKLVSDFRKDFQFYKVREINNYHHAHDAYLNA |
| | VVGTALIKKYPKLESEFVYGDYKVYDVRKMIAKSEQEIGKATAKYFFYSNIMN |
| | FFKTEITLANGEIRKRPLIETNGETGEIVWDKGRDFATVRKVLSMPQVNIVKK |
| | TEVQTGGFSKESILPKRNSDKLIARKKDWDPKKYGGFDSPTVAYSVLVVAKVE |
| | KGKSKKLKSVKELLGITIMERSSFEKNPIDFLEAKGYKEVKKDLIIKLPKYSL |
| | FELENGRKRMLASAGELQKGNELALPSKYVNFLYLASHYEKLKGSPEDNEQKQ |
| | LFVEQHKHYLDEIIEQISEFSKRVILADANLDKVLSAYNKHRDKPIREQAENI |
| | IHLFTLTNLGAPAAFKYFDTTIDRKRYTSTKEVLDATLIHQSITGLYETRIDL |
| | SQLGGDSGGSSGGSSGSETPGTSESATPESSGGSSGGSSTATRDKKDTVTREK |
| | HPKKPFQKWMKDRAIKKGNYLRFQRLFYLDRGKLAKIILDDIECLSCDIPLSE |
| | IYSVFKTRWETTGSFKSLGDFKTYGKADNTAFRELITAKEIEKNVQEMSKGSA |
| | PGPDGITLGDVVKMDPEFSRTMEIFNLWLTTGKIPDMVRGCRTVLIPKSSKPD |
| | RLKDINNWRPITIGSILLRLFSRIVTARLSKACPLNPRQRGFIRAAGCSENLK |
| | LLQTIIWSAKREHRPLGVVFVDIAKAFDTVSHQHIIHALQQREVDPHIVGLVS |
| | NMYENISTYITTKRNTHTDKIQIRVGVKQGDPMSPLLFNLAMDPLLCKLEESG |
| | KGYHRGQSSITAMAFADDLVLLSDSWENMNTNISILETFCNLTGLKTQGQKCH |
| | GFYIKPTKDSYTINDCAAWTINGTPLNMIDPGESEKYLGLQFDPWIGIARSGL |
| | STKLDFWLQRIDQAPLKPLQKTDILKTYTIPRLIYIADHSEVKTALLETLDQK |
| | IRTAVKEWLHLPPCTCDAILYSSTRDGGLGITKLAGLIPSVQARRLHRIAQSS |
| | DDTMKCFMEKEKMEQLHKKLWIQAGGDRENIPSIWEAPPSSEPPNNVSTNSEW |
| | EAPTQKDKFPKPCNWRKNEFKKWTKLASQGRGIVNFERDKISNHWIQYYRRIP |
| | HRKLLTALQLRANVYPTREFLARGRQDQYIKACRHCDADIESCAHIIGNCPVT |
| | QDARIKRHNYICELLLEEAKKKDWVVFKEPHIRDSNKELYKPALIFVKDARAL |
| | VVDVTVRYEAAKSSLEEAAAEKVRKYKHLETEVRHLTNAKDVTFVGFPLGARG |
| | KWHQDNFKLLTELGLSKSRQVKMAETFSTVALFSSVDIVHMFASRARKSMVM |
| | (SEQ ID NO: 1682) |
| S. pyogenes Cas9 | MAPKKKRKVGIHGVPAADKKYSIGLDIGTNSVGWAVITDEYKVPSKKFKVLGN |
| N863 A nickase | TDRHSIKKNLIGALLFDSGETAEATRLKRTARRRYTRRKNRICYLQEIFSNEM |
| mutant attached at | AKVDDSFFHRLEESFLVEEDKKHERHPIFGNIVDEVAYHEKYPTIYHLRKKLV |
| v2 location of DBD | DSTDKADLRLIYLALAHMIKFRGHFLIEGDLNPDNSDVDKLFIQLVQTYNQLF |
| of R2Tg containing | EENPINASGVDAKAILSARLSKSRRLENLIAQLPGEKKNGLFGNLIALSLGLT |
| EN mutation with | PNFKSNFDLAEDAKLQLSKDTYDDDLDNLLAQIGDQYADLFLAAKNLSDAILL |
| XTEN33aa linker | SDILRVNTEITKAPLSASMIKRYDEHHQDLTLLKALVRQQLPEKYKEIFFDQS |
| | KNGYAGYIDGGASQEEFYKFIKPILEKMDGTEELLVKLNREDLLRKQRTFDNG |
| | SIPHQIHLGELHAILRRQEDFYPFLKDNREKIEKILTFRIPYYVGPLARGNSR |
| | FAWMTRKSEETITPWNFEEVVDKGASAQSFIERMTNFDKNLPNEKVLPKHSLL |
| | YEYFTVYNELTKVKYVTEGMRKPAFLSGEQKKAIVDLLFKTNRKVTVKQLKED |
| | YFKKIECFDSVEISGVEDRFNASLGTYHDLLKIIKDKDFLDNEENEDILEDIV |
| | LTLTLFEDREMIEERLKTYAHLFDDKVMKQLKRRRYTGWGRLSRKLINGIRDK |
| | QSGKTILDFLKSDGFANRNFMQLIHDDSLTFKEDIQKAQVSGQGDSLHEHIAN |
| | LAGSPAIKKGILQTVKVVDELVKVMGRHKPENIVIEMARENQTTQKGQKNSRE |
| | RMKRIEEGIKELGSQILKEHPVENTQLQNEKLYLYYLQNGRDMYVDQELDINR |
| | LSDYDVDHIVPQSFLKDDSIDNKVLTRSDKARGKSDNVPSEEVVKKMKNYWRQ |
| | LLNAKLITQRKFDNLTKAERGGLSELDKAGFIKRQLVETRQITKHVAQILDSR |
| | MNTKYDENDKLIREVKVITLKSKLVSDFRKDFQFYKVREINNYHHAHDAYLNA |
| | VVGTALIKKYPKLESEFVYGDYKVYDVRKMIAKSEQEIGKATAKYFFYSNIMN |
| | FFKTEITLANGEIRKRPLIETNGETGEIVWDKGRDFATVRKVLSMPQVNIVKK |
| | TEVQTGGFSKESILPKRNSDKLIARKKDWDPKKYGGFDSPTVAYSVLVVAKVE |
| | KGKSKKLKSVKELLGITIMERSSFEKNPIDFLEAKGYKEVKKDLIIKLPKYSL |
| | FELENGRKRMLASAGELQKGNELALPSKYVNFLYLASHYEKLKGSPEDNEQKQ |
| | LFVEQHKHYLDEIIEQISEFSKRVILADANLDKVLSAYNKHRDKPIREQAENI |
| | IHLFTLTNLGAPAAFKYFDTTIDRKRYTSTKEVLDATLIHQSITGLYETRIDL |
| | SQLGGDSGGSSGGSSGSETPGTSESATPESSGGSSGGSSTATRDKKDTVTREK |
| | HPKKPFQKWMKDRAIKKGNYLRFQRLFYLDRGKLAKIILDDIECLSCDIPLSE |
| | IYSVFKTRWETTGSFKSLGDFKTYGKADNTAFRELITAKEIEKNVQEMSKGSA |
| | PGPDGITLGDVVKMDPEFSRTMEIFNLWLTTGKIPDMVRGCRTVLIPKSSKPD |
| | RLKDINNWRPITIGSILLRLFSRIVTARLSKACPLNPRQRGFIRAAGCSENLK |
| | LLQTIIWSAKREHRPLGVVFVDIAKAFDTVSHQHIIHALQQREVDPHIVGLVS |
| | NMYENISTYITTKRNTHTDKIQIRVGVKQGDPMSPLLFNLAMDPLLCKLEESG |
| | KGYHRGQSSITAMAFADDLVLLSDSWENMNTNISILETFCNLTGLKTQGQKCH |
| | GFYIKPTKDSYTINDCAAWTINGTPLNMIDPGESEKYLGLQFDPWIGIARSGL |
| | STKLDFWLQRIDQAPLKPLQKTDILKTYTIPRLIYIADHSEVKTALLETLDQK |
| | IRTAVKEWLHLPPCTCDAILYSSTRDGGLGITKLAGLIPSVQARRLHRIAQSS |
| | DDTMKCFMEKEKMEQLHKKLWIQAGGDRENIPSIWEAPPSSEPPNNVSTNSEW |
| | EAPTQKDKFPKPCNWRKNEFKKWTKLASQGRGIVNFERDKISNHWIQYYRRIP |
| | HRKLLTALQLRANVYPTREFLARGRQDQYIKACRHCDADIESCAHIIGNCPVT |
| | QDARIKRHNYICELLLEEAKKKDWVVFKEPHIRDSNKELYKPALIFVKDARAL |
| | VVDVTVRYEAAKSSLEEAAAEKVRKYKHLETEVRHLTNAKDVTFVGFPLGARG |
| | KWHQDNFKLLTELGLSKSRQVKMAETFSTVALFSSVDIVHMFASRARKSMVM |
| | (SEQ ID NO: 1683) |
| S. pyogenes Cas9 | MAPKKKRKVGIHGVPAADKKYSIGLDIGTNSVGWAVITDEYKVPSKKFKVLGN |
| attached at v2 | TDRHSIKKNLIGALLFDSGETAEATRLKRTARRRYTRRKNRICYLQEIFSNEM |
| location of DBD of | AKVDDSFFHRLEESFLVEEDKKHERHPIFGNIVDEVAYHEKYPTIYHLRKKLV |
| R2Tg containing EN | DSTDKADLRLIYLALAHMIKFRGHFLIEGDLNPDNSDVDKLFIQLVQTYNQLF |
| mutation with | EENPINASGVDAKAILSARLSKSRRLENLIAQLPGEKKNGLFGNLIALSLGLT |
| XTEN33aa linker | PNFKSNFDLAEDAKLQLSKDTYDDDLDNLLAQIGDQYADLFLAAKNLSDAILL |
| | SDILRVNTEITKAPLSASMIKRYDEHHQDLTLLKALVRQQLPEKYKEIFFDQS |
| | KNGYAGYIDGGASQEEFYKFIKPILEKMDGTEELLVKLNREDLLRKQRTFDNG |
| | SIPHQIHLGELHAILRRQEDFYPFLKDNREKIEKILTFRIPYYVGPLARGNSR |
| | FAWMTRKSEETITPWNFEEVVDKGASAQSFIERMTNFDKNLPNEKVLPKHSLL |
| | YEYFTVYNELTKVKYVTEGMRKPAFLSGEQKKAIVDLLFKTNRKVTVKQLKED |
| | YFKKIECFDSVEISGVEDRFNASLGTYHDLLKIIKDKDFLDNEENEDILEDIV |
| | LTLTLFEDREMIEERLKTYAHLFDDKVMKQLKRRRYTGWGRLSRKLINGIRDK |
| | QSGKTILDFLKSDGFANRNFMQLIHDDSLTFKEDIQKAQVSGQGDSLHEHIAN |
| | LAGSPAIKKGILQTVKVVDELVKVMGRHKPENIVIEMARENQTTQKGQKNSRE |
| | RMKRIEEGIKELGSQILKEHPVENTQLQNEKLYLYYLQNGRDMYVDQELDINR |
| | LSDYDVDHIVPQSFLKDDSIDNKVLTRSDKNRGKSDNVPSEEVVKKMKNYWRQ |
| | LLNAKLITQRKFDNLTKAERGGLSELDKAGFIKRQLVETRQITKHVAQILDSR |
| | MNTKYDENDKLIREVKVITLKSKLVSDFRKDFQFYKVREINNYHHAHDAYLNA |
| | VVGTALIKKYPKLESEFVYGDYKVYDVRKMIAKSEQEIGKATAKYFFYSNIMN |
| | FFKTEITLANGEIRKRPLIETNGETGEIVWDKGRDFATVRKVLSMPQVNIVKK |
| | TEVQTGGFSKESILPKRNSDKLIARKKDWDPKKYGGFDSPTVAYSVLVVAKVE |
| | KGKSKKLKSVKELLGITIMERSSFEKNPIDFLEAKGYKEVKKDLIIKLPKYSL |
| | FELENGRKRMLASAGELQKGNELALPSKYVNFLYLASHYEKLKGSPEDNEQKQ |
| | LFVEQHKHYLDEIIEQISEFSKRVILADANLDKVLSAYNKHRDKPIREQAENI |
| | IHLFTLTNLGAPAAFKYFDTTIDRKRYTSTKEVLDATLIHQSITGLYETRIDL |
| | SQLGGDSGGSSGGSSGSETPGTSESATPESSGGSSGGSSTATRDKKDTVTREK |
| | HPKKPFQKWMKDRAIKKGNYLRFQRLFYLDRGKLAKIILDDIECLSCDIPLSE |
| | IYSVFKTRWETTGSFKSLGDFKTYGKADNTAFRELITAKEIEKNVQEMSKGSA |
| | PGPDGITLGDVVKMDPEFSRTMEIFNLWLTTGKIPDMVRGCRTVLIPKSSKPD |
| | RLKDINNWRPITIGSILLRLFSRIVTARLSKACPLNPRQRGFIRAAGCSENLK |
| | LLQTIIWSAKREHRPLGVVFVDIAKAFDTVSHQHIIHALQQREVDPHIVGLVS |
| | NMYENISTYITTKRNTHTDKIQIRVGVKQGDPMSPLLFNLAMDPLLCKLEESG |
| | KGYHRGQSSITAMAFADDLVLLSDSWENMNTNISILETFCNLTGLKTQGQKCH |
| | GFYIKPTKDSYTINDCAAWTINGTPLNMIDPGESEKYLGLQFDPWIGIARSGL |
| | STKLDFWLQRIDQAPLKPLQKTDILKTYTIPRLIYIADHSEVKTALLETLDQK |
| | IRTAVKEWLHLPPCTCDAILYSSTRDGGLGITKLAGLIPSVQARRLHRIAQSS |
| | DDTMKCFMEKEKMEQLHKKLWIQAGGDRENIPSIWEAPPSSEPPNNVSTNSEW |
| | EAPTQKDKFPKPCNWRKNEFKKWTKLASQGRGIVNFERDKISNHWIQYYRRIP |
| | HRKLLTALQLRANVYPTREFLARGRQDQYIKACRHCDADIESCAHIIGNCPVT |
| | QDARIKRHNYICELLLEEAKKKDWVVFKEPHIRDSNKELYKPALIFVKDARAL |
| | VVDVTVRYEAAKSSLEEAAAEKVRKYKHLETEVRHLTNAKDVTFVGFPLGARG |
| | KWHQDNFKLLTELGLSKSRQVKMAETFSTVALFSSVDIVHMFASRARKSMVM |
| | (SEQ ID NO: 1684) |

### Example 4: Inactivation of an Endogenous Nucleolar Localization Signal in a Gene Writer

[0671] This example describes a Gene Writer in which an endogenous nucleolar localization signal has been inactivated to reduce intracellular targeting of the protein to the nucleolus.

[0672] In this example, the nucleolar localization signal (NoLS) of a retrotransposase is computationally predicted using a published algorithm that was trained on validated proteins that localize to the nucleolus (Scott, M. S., et al, Nucleic Acids Research, 38(21), 7388-7399 (2010)). The predicted NoLS sequence is based on both amino acid sequence, amino acid sequence context, and predicted secondary structure of the retrotransposase. The identified sequence is typically rich with basic amino acids (Scott, M. S., et al, Nucleic Acids Research, 38(21), 7388-7399 (2010)) and when these residues are mutated to a simple side-chain, non-basic, amino acids or removed from the retrotransposase polypeptide chain then it can prevent localization to the nucleolus (Yang, C. P., et. al., Journal of Biomedical Science, 22(1), 1-15. (2015), Martin, R. M., et. al., Nucleus, 6(4), 314-325 (2015)). In some embodiments, the NoLS sequence is located in the amino acid region of a retrotransposase that is between the reverse transcriptase polymerase motif and the restriction-like endonuclease motifs. The predicted NoLS region contains lysine, arginine, histidine, and/or glutamine amino acids where nucleolar localization is inactivated by mutation of one or more of these residues to an alanine amino acid residue and/or one or more of these amino acids are removed from the polypeptide chain of the retrotransposase. In some embodiments, the amino acid sequence of the Gene Writer driver of R2Tg found upstream of the RLE is mutated such that lysines (K) are substituted for alanines (A), e.g., the predicted NoLS of R2Tg (amino acids 1,128-1,154 of polypeptide sequence), (APTQKDKFPKPCNWRKNEFKKWTKLAS (SEQ ID NO: 1685)) is mutated at 1, 2, 3, 4, 5, 6, or 7 residues to produce an inactivated NoLS (APTQADAFPAPCNWRANEFAAWTALAS (SEQ ID NO: 1686)).

### Example 5: Application of Second-Strand Nicking in a Gene Writer System

[0673] This example describes a Gene Writer system in which retrotransposition is paired with targeted second-strand nicking activity in order to increase the efficiency of integration events. The second strand nick can be achieved by (1) a Cas9 nickase fused to a gene writer system, in which the Gene Writer introduces one nick through its endonuclease domain (EN), and the fused nickase Cas9 places another nick on either the top and bottom DNA strands (FIG. 7A), or (2) a GeneWriter system in which the active EN domain introduces a nick, and a Cas9 nickase introduces a second nick on either top or bottom strand of the DNA, upstream or downstream of the Gene Writer induced nick (FIG. 7B).

[0674] In the first part of this example, a Cas9 nickase is fused to a Gene Writer protein (FIG. 7A). The Cas9 is targeted to a DNA sequence through a gRNA. The Gene Writer protein introduces a DNA nick through its EN domain, and an additional nick is generated through the nickase Cas9 activity. This additional nick can be targeted to the top or bottom strands of the DNA surrounding the Gene Writer introduced nick (FIG. 1 A). Constructs designed and tested include (see schematic FIG. 8A):
[0675] Cas9-N863A-R2tg (RBD*, RT, EN)
[0676] Cas9-H840A-R2tg (RBD*, RT, EN)
[0677] Cas9-D10A-R2tg (RBD*, RT, EN)
[0678] dCas9-R2tg (RBD*, RT, EN)
   The DNA binding domain is the nickase Cas9 that directs the Gene Writer molecule to a DNA target through a gRNA. The RNA binding domain (RBD) in this set of Gene Writer constructs is inactivated with a point mutation (RBD*). As a donor for insertion, constructs in which the R2Tg RNA binding domain is inactive use a gRNA that is extended at its 3′ end to include donor sequence for genome modification (FIG. 8B). These modifications include nucleotide substitutions, nucleotide deletions and nucleotide insertions. In this first set of experiments, the above constructs-R2Tg(RBD*, RT, EN) and dCas9-R2Tg(RBD*, RT, EN) fusions with a 3′ extended gRNA template targeting the AAVS1 locus are delivered to U2OS cells through nucleofection in SE buffer using program DN100. gRNAs used include gRNAs for each construct that target either the bottom or top strand of DNA. After nucleofection, cells are grown in complete medium for 3 days. gDNA is harvested on day 3, and amplicon sequencing followed by computational analysis using CRISPResso (indel analysis tool) are performed. 3′ extended gRNA mediated insertions, deletions or nucleotide substitutions are observed upon delivery of dCas9-R2Tg(RBD*, RT, EN), and increased in frequency when delivering Nickase-Cas9-R2Tg(RBD*, RT, EN) constructs.

[0679] In the second part of this example, a Cas9 nickase is fused to a Gene Writer protein (FIG. 7A). The Cas9 is targeted to a DNA sequence through a gRNA. The Gene Writer protein introduces a DNA nick through its EN domain, and an additional nick is generated through the nickase Cas9 activity. This additional nick can be targeted to the top or bottom strands of the DNA surrounding the Gene Writer introduced nick (FIG. 7A). In contrast to the constructs listed above, the RNA binding domain of R2Tg is active (FIG. 9A), and the template used for genome modification is a transgene flanked by UTRs (FIG. 9B). Constructs include (see schematic FIG. 9A):
[0680] Cas9-N863A-R2tg (RBD, RT, EN)
[0681] Cas9-H840A-R2tg (RBD, RT, EN)
[0682] Cas9-D10A-R2tg (RBD, RT, EN)
[0683] dCas9-R2tg (RBD, RT, EN)
   The transgene flanked by UTRs requires homology arms at the site of nicking. To determine the site of nicking for the accurate design of homology arms for the donor transgene DNA, the above listed constructs are nucleofected into 200 k U2OS cells with a gRNA targeting the AAVS1 locus using pulse code DN100. After nucleofection, cells are grown in complete medium for 3 days. gDNA is harvested on day 3, and amplicon sequencing followed by computational analysis using CRISPResso as an indel analysis tool are performed. The nicking site of the EN domain is identified from the indels the EN domain produces at the AAVS1 site. Homology arms of 100 bp flanking the EN nicking site are designed and included in the transgene (see FIGS. 9 and 10 for location of homology arms in transgene). To achieve genome modification, Cas9-R2Tg fusion constructs listed above are nucleofected into U2OS cells, along with a gRNA targeting either the top or bottom strand of the AAVS1 locus, and the appropriate transgenes harboring homology to the previously determined nicking site. After nucleofection, cells are grown in complete medium for 3 days. gDNA is harvested on day 3, and ddPCR is performed to detect transgene integration at the AAVS1 site. Integrations are observed upon delivery of dCas9-R2Tg(RBD, RT, EN), and increased in frequency when delivering Nickase-Cas9-R2Tg(RBD, RT, EN) constructs.

[0684] In another example, a Gene Writer protein is targeted to DNA through its DNA binding domain (FIG. 7B). The Gene Writer protein will introduce a DNA nick at a DNA strand. In addition, a Cas9 nickase is used to generate a second nick either on the top or bottom strands of the DNA, upstream or downstream of the first nick. In this example, a Gene Writer plasmid targeting the AAVS1 site (FIG. 10A) and with a UTR flanked transgene with homology to the AAVS1 site (FIG. 10B) is nucleofected into 200 k U2OS cells using pulse code DN100. The following Cas9 constructs are transfected alongside the Gene Writer plasmids (FIG. 10C):
[0685] Cas9-N863A
[0686] Cas9-H840A
[0687] Cas9-D10A
[0688] dCas9
   All Cas9 constructs are co-nucleofected with gRNAs targeting the AAVS1 locus on either the top or bottom strands, upstream or downstream of the Gene Writer introduced nick. After nucleofection, cells are grown in complete medium for 3 days. gDNA is harvested on day 3, and ddPCR is performed to detect transgene integration at the AAVS1 site. Integrations are observed upon delivery of dCas9 and increased in frequency when delivering Nickase-Cas9 constructs.

### Example 6: Improved Expression of Gene Writer Polypeptide by Heterologous UTRs

[0689] This example describes the use of heterologous UTRs to enhance the intracellular expression of the Gene Writer polypeptide.

[0690] In this example, the Gene Writer polypeptide was expressed from mRNA (FIG. 11). In the plasmid template for the mRNA production, the native retrotransposon UTRs were replaced with UTRs optimized for the protein expression (C3 5′UTR and ORM 3′ UTR from Asrani et al., RNA biology 15, 756-762 (2018) or 5′ and 3′ UTRs from Richter et al., Cell 168, 1114-1125 (2017)). The plasmid included the T7 promoter followed by the 5′UTR, the retrotransposon coding sequence, the 3′ UTR, 3GS linker (SEQ ID NO: 1024), SV40 nuclear localization signal (NLS), XTEN linker, HiBit sequence and 96-100 nucleotide long poly(A) tail (SEQ ID NO: 1687). The plasmid was linearized by enzymatic restriction resulting in blunt end or 5′ overhang downstream of poly(A) tail and used for in vitro transcription (IVT) using T7 polymerase (NEB). Following the IVT step the RNA was treated with DNase I (NEB). After the buffer exchange step the enzymatic capping reaction was performed using Vaccinia capping enzyme (NEB) and 2′-O-methyltransferase (NEB) in the presence of GTP and SAM (NEB). The capped RNA was concentrated and buffer exchanged. 50,000 HEK293T cells were transfected with 0.5 μg with the Gene Writer mRNA in the presence or in the absence of the RNA template in 1:1 molar ratio using Neon transfection system (1150 V per pulse, 20 msec per pulse, 2 pulses in 10 μL tips in 96 well format). The RNA template was in vitro transcribed from plasmid as described in Example 8 (Improved Gene Writer components for RNA-based delivery).

[0691] After transfection HEK293T cells were grown for 5 hours before assaying the Gene Writer expression by probing its HiBit tag expression using standard protocol https://www.promega.com/-/media/files/resources/protocols/technical-manuals/500/nano-glo-hibit-lytic-detection-system-technical-manual.pdf?la=en. Protein expression was found to be greatly improved by the use of 5′ and 3′ UTRₑₓₚ from C3-ORM as compared to using the native UTRs from R2Tg (FIG. 11). The genome integration was assayed 3 days post-transfection using 3′ ddPCR (FIG. 12).

### Example 7: Improved Gene Writer Components for Mixed RNA and DNA Delivery

[0692] This example describes improvements to the RNA molecule encoding a Gene Writer polypeptide that enhance expression and allow for increased efficiency of retrotransposition when used with a Gene Writer template encoded on plasmid DNA.

[0693] In this example, the polypeptide component of the Gene Writer™ system is expressed from mRNA described in Example 6 (Improved expression of Gene Writer polypeptide by heterologous UTRs). The plasmid template was synthesized such that the reporter gene (eGFP) was flanked by R2Tg untranslated regions (UTRs) and 100 bp of homology to its rDNA target. The template expression was driven by the mammalian CMV promoter. We introduced the plasmid into HEK393T cells using the FuGENE® HD transfection reagent. HEK293T cells were seeded in 96-well plates at 10,000 cells/well 24 hours before transfection. On the transfection day, 0.5 μl transfection reagent and 80 ng DNA was mixed in 10 μl Opti-MEM and incubated for 15 minutes at room temperature. The transfection mixture was then added to the medium of the seeded cells. Cells were detached and used for the electroporation of 0.5 μg of mRNA per well using Neon transfection system (1150 V per pulse, 20 msec per pulse, 2 pulses in 10 μL tips in 96 well format).

HEK293T cells were transfected with the following test agents:
[0694] 1. mRNA coding for the polypeptide described above
[0695] 2. Plasmid encoding template RNA described above
[0696] 3. Combination of 1 and 2. The plasmid was pre-lipofected 24 hrs before mRNA transfection as described above.
   After transfection, HEK293T cells were cultured for 1-3 days and then assayed for site-specific genome editing. Genomic DNA was isolated from each group of HEK293 cells. ddPCR was performed to confirm integration and assess integration efficiency. Taqman probes and primers were designed as described in PCT/US2019/048607 to amplify the expected product across 5′ and 3′ ends of integration junctions. The results of the ddPCR copy number analysis (in comparison to reference gene RPP30) are shown in FIG. 13. The genome integration in the presence of the mRNA and the template plasmid achieved a mean copy number of 0.683 integrants/genome when targeting 3′ junction and of 0.249 integrants/genome when targeting 5′ junction. The mRNA only transfection resulted in a mean copy number of 0.002 integrants/genome, in comparison to 0.0004 integrants/genome for the plasmid only transfection.

### Example 8: Improved Gene Writer Components for RNA-Based Delivery

[0697] This example describes improvements to the RNA molecule encoding a Gene Writer polypeptide that enhance expression and allow for increased efficiency of retrotransposition when co-delivered with a Gene Writer RNA template.

[0698] In this example, the polypeptide component of the Gene Writer™ system is expressed from mRNA described in Example 6 (Improved expression of Gene Writer polypeptide by heterologous UTRs). The plasmid template for the RNA template production included T7 promoter followed by the IRES-expressing reporter gene (eGFP) flanked by R2Tg untranslated regions (UTRs) and 100 bp of homology to its rDNA target. The plasmid template was linearized by enzymatic restriction resulting in blunt end or 5′ overhang downstream of the RNA template sequence and used for in vitro transcription (IVT) using T7 RNA polymerase (NEB). Following the IVT step the RNA was treated with DNase I (NEB) and either enzymatically polyadenylated by poly(A) polymerase (NEB) or not. After the buffer exchange step the enzymatic capping reaction was performed using Vaccinia capping enzyme (NEB) and 2′-O-methyltransferase (NEB) in the presence of GTP and SAM (NEB). The capped RNA was concentrated and buffer exchanged. 50,000 HEK293T cells were co-transfected with 0.5 to 1 μg of the GeneWriter mRNA and the RNA template in 1:4 to 1:12 molar ratios. The Neon transfection system was used for the RNA transfection (1150 V per pulse, 20 msec per pulse, 2 pulses in 10 μL tips in 96 well format).

[0699] After transfection, HEK293T cells were cultured for at least 1 day and then assayed for site-specific genome editing. Genomic DNA was isolated from each group of HEK293 cells. ddPCR was performed to confirm integration and assess integration efficiency. Taqman probes and primers were designed as described in PCT/US2019/048607 to amplify the expected product across 5′ and 3′ ends of integration junctions. The mean copy number of 0.498 integrants/genome was achieved in the presence of the 0.5 μg of mRNA and 1:8 molar ratio of Gene Writer mRNA to the RNA template when the RNA template was enzymatically polyadenylated, in comparison to that of 0.031 integrants/genome when the RNA transgene was not polyadenylated.

### Example 9: Gene Writers that Deliver Genetic Cargo Containing Introns

[0700] This example describes the use of a Gene Writer system to integrate genetic cargo that contains introns by using RNA-based delivery to tune expression of the gene of interest from its newly introduced genomic locus.

[0701] In this example, Gene writing technology uses an RNA template encoding a protein of interest including its native or non-native introns. For example, intron 6 of the triose phosphate isomerase (TPI) gene (Nott et al., 2003) will be used as one of the non-native introns in these experiments.

[0702] The presence of introns in the genomic copy of a gene and their removal by splicing has been reported to affect nearly every aspect of the gene expression, including its transcription rate, the mRNA processing, export, cell localization, translation and decay (reviewed in Shaul International Journal of Biochemistry and Cell Biology 91B, 145-155 (2017)). The introns can be inserted into different parts of the RNA template (FIG. 15) and depending on the intron location their role in gene expression can differ.

[0703] An intron in the 5′ UTRₑₓₚ, close to the transcription start site, introduces activating chromatin modifications (Bieberstein et al., Cell Reports 2, 62-68 (2012)), improves accuracy of transcription start site recognition and facilitates PolII recruitment (Laxa et al., Plant Physiology 172, 313-327 (2016)), increases rates of transcription initiation (Kwek et al., Nature Structural Biology 9, 800-805 (2002)) and elongation (Lin et al., Nature Structural and Molecular Biology 15, 819-826 (2008)), and improve the productive elongation in the sense relative to the antisense orientation (Almada et al., Nature 499, 360-363 (2013)).

[0704] An intron in the 3′ UTRexp limits the mRNA expression to one protein molecule per mRNA: the exon junction complex (EJC) left by spliceosome downstream of stop codon is recognized by the nonsense-mediated decay (NMD) machinery and therefore the mRNA is marked for deletion at the end of the pioneering round of translation (Zhang et al., RNA 4, 801-815 (1998)).

[0705] The ability to employ introns in a therapeutic gene may, however, be limited by splicing that occurs prior to integration of the template. For example, an intron in the forward orientation would be spliced out when an RNA template was encoded and delivered on a DNA plasmid, since transcription in the same direction would yield a template RNA that would be spliced prior to integration, thus failing to incorporate the intron in the genome. Additionally, lentivirus constructs designed to deliver a transgene must encode a sequence with an intron in the reverse orientation, since the viral packaging process would result in intron splicing and absence of the intron in packaged viral particles (Miller et al. J Virol 62, 4337-45 (1988)). However, the reverse orientation has also been thought to result in a reduction in viral titer and transduction (Uchida et al., Nat Commun 10, 4479 (2019)). It is worth noting that since the Gene Writer template can be generated through in vitro transcription and delivered directly as RNA, the problem of pre-integration splicing of desired introns can be avoided. In some embodiments, the Gene Writer template may thus contain one or more introns in same-sense orientation with the transcript, which is generated by IVT and delivered to the target cell as RNA.

[0706] An intron in any location depicted in FIG. 15 will recruit U1 snRNP that protects mRNA from the premature cleavage and polyadenylation (Kaida et al., Nature 468 664-681 (2010); Berg et al., Cell 150, 53-64 (2012)). In addition, the EJC interacts with components of the TREX (transcription-export) complex and increases the rate of mRNA export from nucleus to cytoplasm 6-10-fold in comparison to the constructs lacking introns (Valencia et al., PNAS 105, 3386-3391 (2008)). It was also demonstrated that the binding of the polypyrimidine tract-binding protein, a splicing regulator protein, mediates a significant increase in the half-life of the spliced transcripts (Lu & Cullen, RNA 9, 618-630 (2003); Millevoi et al., Nucleic Acid Research 37, 4672-4683 (2009)). The efficiency of the mRNA translation was shown to be increased by the presence of the SR proteins (serine-arginine rich proteins, involved in RNA splicing) (Sanford et al., Genes & Development 18, 755-768 (2004); Sato et al., Molecular Cell 29, 255-262 (2008)) and the EJC proteins and its peripheral factors (Nott et al., Genes & Development 18, 210-222 (2004)).

[0707] In this example both the template RNAs harboring an intron or introns and Gene Writer polypeptide are delivered to the cells as in vitro transcribed capped RNAs as described in Example 8 (Improved Gene Writer components for RNA-based delivery). One to three days post-transfection the GOI expression and the genomic integration are assayed. In some embodiments, the genome integration and/or protein expression will be higher for the intron-containing RNA template.

### Example 10: Engineering of the Retrotransposon 5′ UTR to Improve Efficiency of Integration

[0708] This example describes the deletion, replacement, or mutation of the 5′UTR of a retrotransposon to increase integration efficiency.

[0709] The 5′UTR region of non-LTR retrotransposons has multiple functions including self-cleaving ribozyme activity, which has been shown in certain elements and is predicted in additional retrotransposons (see modules B and C of FIG. 26-27) (Ruminski et al. J Biol Chem 286, 41286-41295 (2011)). Ribozymal activity is predicted to cleave the RNA within or upstream of the 5′UTR. Either increasing or restricting this activity and structural component of the 5′UTR may benefit retrotransposition efficiency. A prediction of the ribozyme structure of R2Tg is provided in FIG. 28.

[0710] In order to evaluate engineering of the 5′UTR, constructs were designed to enhance or diminish these activities (FIG. 14). In case (A), the natural 5′UTR of R2Tg is used to integrate in trans as in previous experiments. Case (B) illustrates deletion of the 5′UTR. (C) and (D) represent cases in which the 5′UTR from the original species (in this case R2Tg from T. guttata) has been replaced by the 5′UTR of a retrotransposon from a distinct species. Case (C) provides an example in which the 5′UTR from A. maritima R2 has replaced that of R2Tg. (D) represents the generic case in which UTRs from additional species may be substituted (“Rx”), such as that from B. mori, D. ananasse, F. auricularia, L. polyphemus, N. giraulti, or O. latipes, or from a retrotransposon selected from a Table herein, or any of Tables 1-3 of PCT/US2019/048607, herein incorporated by reference in its entirety. Case (E) represents the substitution of a ribozyme, such as a hammerhead ribozyme, e.g., RiboJ (Lou et al Nat Biotechnol 30, 1137-1142 (2012)). Case (F) represents the inactivation of the 5′UTR of R2Tg through point mutations, e.g., 75C>T in the 5′ UTR (FIG. 14.B, position indicated by shaded box). 5′UTR sequences are expected to be modular to any insertion sequence mediated by the retrotransposon.

[0711] Each case is evaluated as in previous examples by transfection of Gene Writer polypeptide plasmid with template plasmid and evaluation of integration frequency via ddPCR. In some embodiments, substitution or mutation of the 5′ UTR results in increased efficiency of integration.

### Example 11: Modifying the 5′ and 3′ Ends of Gene Writer RNA Components to Improve RNA Stability

[0712] This example describes the addition of non-coding sequences to the 5′ and 3′ ends of RNA in order to improve stability in a mammalian cell.

[0713] The decay of eukaryotic RNAs in cells are mostly carried out by exoribonucleases. In this example, the half-life of RNAs is prolonged by introducing protective sequences and/or modifications at their 5′ and 3′ ends. The most common natural way of protecting the RNA ends is by introduction of 5′ cap structure and 3′ poly(A) tail. In this example, the polypeptide component of the Gene Writer™ system is expressed from mRNA described in Example 6 (Improved expression of Gene Writer polypeptide by heterologous UTRs). The plasmid template for the RNA template production included T7 promoter followed by the IRES-expressing reporter gene (eGFP) flanked by R2Tg untranslated regions (UTRs) and 100 bp of homology to its rDNA target. The plasmid template was linearized by enzymatic restriction resulting in blunt end or 5′ overhang downstream of the RNA template sequence and used for in vitro transcription (IVT) using T7 polymerase (NEB). Following the IVT step the RNA was treated with DNase I (NEB) and either enzymatically polyadenylated by poly(A) polymerase (NEB) or not. After the buffer exchange step the enzymatic capping reaction resulting in cap 1 structure was performed as described in Example 8 (Improved Gene Writer components for RNA-based delivery) or not performed. The template RNA was concentrated and buffer exchanged. 50,000 HEK293T cells were co-transfected with 0.5 μg with the GeneWriter mRNA and the RNA template in 1:1 to 1:8 molar ratios using Neon transfection system (1150 V per pulse, 20 msec per pulse, 2 pulses in 10 μL tips in 96 well format).

[0714] After transfection, HEK293T cells were cultured for 1-3 days and then assayed for site-specific genome editing. Genomic DNA was isolated from each group of HEK293 cells. ddPCR was performed to confirm integration and assess integration efficiency. Taqman probes and primers were designed as described in PCT/US2019/048607 to amplify the expected product across 3′ end of integration junctions. The genome integration was improved when the enzymatically capped and poly(A) tailed template was used (FIG. 16).

[0715] The mean copy number of 0.498 integrants/genome was achieved in the presence of the 0.5 μg of mRNA and 1:8 molar ratio of mRNA:RNA template when the RNA template was enzymatically polyadenylated, in comparison to that of 0.031 integrants/genome when the RNA transgene was not enzymatically polyadenylated.

### 3′ End Modifications of RNAs.

[0716] It has been reported that the interactions between poly(A) tail shorter than 15-20 nts and the poly(A) binding protein (PABP) are destabilized resulting in the fast degradation of the RNA (Chang et al., Molecular Cell 53, 1044-1052 (2014); Subtelny et al., Nature 508, 66-71 (2014)). To determine the suitable lengths of the poly(A) tail of the template RNA we will test its lengths of 30, 40, 50, 60, 70, 80, 90 and 100 nucleotides (SEQ ID NO: 2043). The IVT templates will be produced by PCR using reverse primers encoding the poly(A) tails of the abovementioned length. The IVT, DNase I treatment and capping of Gene Writer and the RNA template will be performed as described in Example 8 (Improved Gene Writer components for RNA-based delivery). After one to three days post-transfection the genomic integration will be assayed. In some embodiments, the genome integration will be higher for the RNA template tailed with a poly(A) tail of a suitable length.

[0717] In a cell the RNA degradation is initiated by shortening its poly(A) tail by deadenylases. Since the deadenylases are 3′-5′ exoribonucleases favoring the poly(A) stretches, the terminal uridine, cytidine and most often guanine detected in the natural poly(A) tails of many mRNA were proposed to protect the poly(A) tail from its shortening (Chang et al., Molecular Cell 53, 1044-1052 (2014)). We will assay the Gene Writer and template RNAs with the encoded poly(A) tail with terminal G or C, or intermittent Gs or Cs (similar to that used in Lim et al., Science 361, 701-704 (2018)) according as described before.

[0718] Some of the RNAs have been described to evolve alternative ways of protections their 3′ ends. A specific 16-nucleotide long stem-loop structure flanked with unpaired 5 nucleotides on both sides has been reported to protect the 3′ end of mRNA encoding H2a.X histone (Mannironi et al., Nucleic Acid Research 17, 9113-9126 (1989)). It has been shown that the heterologous mRNA ending with the histone stem-loop structure is cell cycle-regulated (Harris et al., Molecular Cellular Biology 11, 2416-2424 (1991); Stauber et al., EMBO Journal 5, 3297-3303 (1986)). The stem-loop structure is recognized and protected by the Stem-Loop Binding Protein (SLBP). The protein accumulates shortly before cells enter S-phase and is rapidly degraded at the end of S-phase (Whifield et al., Molecular Cellular Biology 20, 4188-4198 (2000)). The stem-loop element will be inserted to the 3′ end of the Gene Writer mRNA and the RNA templates and tested as described above to induce cell-cycle specific genome integration events.

[0719] Some viral and long non-coding RNAs have evolved to protect their 3′ ends with triple-helical structures (Brown et al., PNAS 109, 19202-19207 (2012)). Additionally, the structural elements of tRNA, Y RNA and vault RNA (reviewed in Labno et al., Biochemica et Biophysica Acta 1863, 3125-3147 (2016)) have been reported to extend half-life of these non-coding RNAs. We will insert the structures to protect the 3′ end of the RNA templates and probe their efficiencies in Gene Writing system as described above.

[0720] Finally, we will incorporate dNTP, 2′O-Methylated NTPs or phosphorothioate-NTP at the 3′ of the RNA transgenes to increase the half-life of these molecules by protecting the 3′ end of the RNA from exoribonucleases. We will incorporate single modified nucleotides or their stretches by extending the 3′end of the RNA by the DNA polymerases (for example, Klenow fragment) capable of extending an RNA sequence by adding modified nucleotides (Shcherbakova & Brenowitz, Nature Protocols 3, 288-302 (2008)).

[0721] A single nucleotide chemical modification of the 3′ end of the RNA can be done by first oxidation of 3′ terminal end of ribose sugar with sodium periodate to form a reactive aldehyde followed by conjugation of an aldehyde-reactive modified nucleotide. Alternatively, T4 DNA or T4 RNA ligases can be used for the splinted ligation (Moore & Query, Methods in Enzymology 317, 109-123 (2000)) of the stretches of modified nucleotides to the 3′ end of the RNAs.

[0722] Chemical ligation of two fragments is also possible. The phosphodiester bond linkage between two RNA substrates can be formed either by activating the phosphomonoester group using a reactive imidazolide or by using a condensing reagent such as cyanogen bromide. A disadvantage of chemical ligation is that it can also result in the creation of a 2′-5′ phosphodiester linkage, together with the desired 3′-5′ phosphodiester linkages.

### 5′ End Modifications of RNAs

[0723] In addition to the cap 1 structure described in Example (Improved Gene Writer components for RNA-based delivery) other 5′ end protection groups will be explored. Particularly, we will use hypermethylated (Wurth et al. Nucleic Acid Res 42, 8663-8677 (2014)), phosphorothioate (Kuhn et al., Gene Therapy 17, 961-971 (2010)), NAD+-derived (Kiledjian, Trends in Cell Biology 28, 454-464 (2018)) and modified (for example, biotinylated: Bednarek et al., Phil Trans R Soc B 373, 20180167 (2018)) cap analogs for co-transcriptional capping.

[0724] We will also label the 5′ of the RNA with 5′-[γ-thio]triphosphate to create a reactive sulfur group and chemically modify the 5′ end with the protective modifications using a haloacetamide derivative of the modified group.

[0725] The proposed modifications to protect 3′ and 5′ end of the RNA will be introduced in RNA templates and/or Gene Writer mRNA (if compatible with translation). The genome integration efficiencies of the RNAs will be tested as described in Example 8 (Improved Gene Writer components for RNA-based delivery).

### Example 12: Use of Modified RNA Bases in a Gene Writer System

[0726] This example describes Gene Writer systems comprising modified RNA bases to potentially improve features of the system, e.g., increase efficiency of integration, decrease cellular response to foreign nucleic acids. For the Gene Writer polypeptide, the proposed modifications pertaining to the coding region are compatible with translation. For the RNA template, the proposed modifications are compatible with reverse transcription.

[0727] In this example, mRNA encoding the Gene Writer polypeptide was in vitro transcribed with a 100% replacement of the corresponding rNTP with one of the modified rNTPs: pseudouridine (Ψ), 1-N-methylpseudouridine (1-Me-Ψ), 5-methoxyuridine (5-MO-U) or 5-methylcytidine (5mC). Otherwise, the RNA preparation, purification and cell transfections were performed as described in the Example 8 (Improved Gene Writer components for RNA-based delivery). The gene integration capacity of the modified mRNAs was compared with that of the non-modified mRNA (GO) using ddPCR, with all polypeptide mRNAs being paired with an unmodified template RNA (FIG. 17). Integration was detected when the polypeptide was encoded using each modified rNTP, with the highest signal coming from 5-MO-U and the lowest from 5mC. This demonstrates that the Gene Writer polypeptide component is functional when expressed from mRNA containing modified bases.

[0728] Further, this example describes the modularity of the Gene Writer template molecule where it is composed of all or a subset of the exemplary modules listed in FIG. 19 and illustrated in FIG. 18. Individual modules can be produced by chemical or in vitro syntheses as a contiguous nucleic acid molecule or in separate pieces that are later combined together. The individual modules of the Gene Writer template molecule can be chemically modified nucleic acids, be comprised in part or in entirety of non-nucleic acids, re-arranged in order, and/or omitted to form the Gene Writer template molecule.

[0729] In some embodiments, the Gene Writer template molecule (all modules, A-F) is synthesized by in vitro transcription where 0-100% replacement of a corresponding rNTP (adenosine, cytidine, guanosine, and/or uridine) is with one or more modified rNTPs (base or ribose modification), e.g., 5′ hydroxyl, 5′ Phosphate, 2′-O-methyl, 2′-O-ethyl, 2′-fluoro, ribothymidine, C-5 propynyl-dC (pdC), C-5 propynyl-dU (pdU), C-5 propynyl-C(pC), C-5 propynyl-U (pU), 5-methyl C, 5-methyl U, 5-methyl dC, 5-methyl dU methoxy, (2,6-diaminopurine), 5′-Dimethoxytrityl-N4-ethyl-2′-deoxyCytidine, C-5 propynyl-fC (pfC), C-5 propynyl-fU (pfU), 5-methyl fC, 5-methyl fU, C-5 propynyl-mC (pmC), C-5 propynyl-fU (pmU), 5-methyl mC, 5-methyl mU, LNA (locked nucleic acid), MGB (minor groove binder) pseudouridine (Ψ), 1-N-methylpseudouridine (1-Me-Ψ), 5-methoxyuridine (5-MO-U). The modified nucleotides in this embodiment rely on incorporation through a transcription reaction which utilizes a natural or mutant polypeptide sequence of a RNA polymerase that readily incorporates modified nucleotides into a RNA transcript that is made in vitro (Padilla, R., Nucleic Acids Research, 30(24), 138e-138, 2002; Ibach, J., et. al., Journal of Biotechnology, 167(3), 287-295, 2013; Meyer, A. J., et. al., Nucleic Acids Research, 43(15), 7480-7488, 2015). The modified Gene Writer template molecule is typically in whole or in part compatible with the reverse transcriptase activity of the Gene Writer polypeptide sequence; for modules or parts of modules of the Gene Writer template molecule used as a template for reverse transcription, preference is given to modifications that are compatible with reverse transcription (Motorin et al., Methods in Enzymology 425 21-53, 2007; Mauger et al., PNAS 116, 24075-24083, 2019). Gene Writer systems with template molecules containing modified rNTPs are tested as described above and in Example 8 (Improved Gene Writer components for RNA-based delivery).

[0730] In some embodiments, individual modules are chemically synthesized containing modified nucleotides, e.g., 5′ hydroxyl, 5′ Phosphate, 2′-O-methyl, 2′-O-ethyl, 2′-fluoro, ribothymidine, C-5 propynyl-dC (pdC), C-5 propynyl-dU (pdU), C-5 propynyl-C(pC), C-5 propynyl-U (pU), 5-methyl C, 5-methyl U, 5-methyl dC, 5-methyl dU methoxy, (2,6-diaminopurine), 5′-Dimethoxytrityl-N4-ethyl-2′-deoxyCytidine, C-5 propynyl-fC (pfC), C-5 propynyl-fU (pfU), 5-methyl fC, 5-methyl fU, C-5 propynyl-mC (pmC), C-5 propynyl-fU (pmU), 5-methyl mC, 5-methyl mU, LNA (locked nucleic acid), MGB (minor groove binder) pseudouridine (Ψ), 1-N-methylpseudouridine (1-Me-Ψ), 5-methoxyuridine (5-MO-U), where the individual modules are then ligated together through enzymatic (e.g., splint ligation using T4 DNA ligase, Moore, M. J., & Query, C. C. Methods in Enzymology, 317, 109-123, 2000) or chemical processes (e.g., Fedorova, O. A., et. al., Nucleosides and Nucleotides, 15(6), 1137-1147, 1996) to form a complete Gene Writer template molecule.

[0731] An example of a modified Gene Writer template molecule is where modules A and F are each 100 nt of chemically synthesized RNA with cytidine and uridine nucleotides containing 2′-O-methyl ribose modifications and module A contains (3) phosphorothioate linkages between the first 3 nucleotides on the 5′ end and module F contains (3) phosphorothioate linkages between the last 3 nucleotides on the 3′ end of the module. Modules B-E are synthesized by in vitro transcription using an RNA polymerase (RNAP), e.g., T7 RNAP, T3 RNAP, or SP6 RNAP (NEB), or derivatives thereof that possess enhanced properties, e.g., increased fidelity, increased processivity, or increased efficiency of incorporating modified nucleotides. Module A is ligated to the 5′ end of the in vitro transcribed module B-E molecule and module F is ligated on to the 3′ end of the in vitro transcribed module B-E molecule by splint ligation (described by Moore, M. J., & Query, C. C. Methods in Enzymology, 317, 109-123, 2000). This fully assembled template RNA (all modules, A-F) is then used with a Gene Writer polypeptide (or nucleic acid encoding the polypeptide) in a target cell to assess genomic integration as in previous examples. In some embodiments, RNA modifications do not decrease the efficiency of integration greater than 50%, e.g., as measured by ddPCR. In some embodiments, RNA modifications improve the efficiency of integration, e.g., as measured by ddPCR. In some embodiments, RNA modifications improve the reverse transcription reaction, e.g., improve the processivity or fidelity as measured by sequencing of integration events.

### Example 13: Gene Writer Templates that do not Incorporate UTRs

[0732] This example describes a configuration of the Gene Writer template molecule that results in an exclusion of the UTRs, such that these regions used in retrotransposition are not integrated into the host cell.

[0733] In this example, we describe the positioning, omission, and/or substitution of the UTR modules of the Gene Writer template molecule (FIGS. 18 and 19) to result in the Gene Writer driver to not incorporate the UTR modules into the genome as a part of retrotransposition. In some embodiments, the Gene Writer template molecule modules for the 5′ and 3′ UTRs (modules B+C and E of Gene Writer template molecule) are moved to the ends of the molecule so that their function of interacting with the Gene Writer driver does not change but the homology arm is now located adjacent to the heterologous object sequence (module D) where complementarity of the homology arms act as a primer for reverse transcription. In some cases, modules B and/or C are omitted from the Gene Writer template molecule with module E following module F.

[0734] Additional examples of not incorporating the UTRs into the genome are removing modules B and C from the Gene Writer template molecule, re-positioning module F (3′ homology arm) to follow module D (heterologous object sequence) and have module E be substituted with a binding ligand such as biotin. This Gene Writer template molecule would now consist of module A (5′ homology arm)-module D (heterologous object sequence)-module F (3′ homology arm)-module E comprised of biotin. The Gene Writer driver polypeptide sequence would be modified to incorporate the amino acid sequence for monomeric streptavidin. This example illustrates how the utility of mediating a non-nucleic acid mediated association of the Gene Writer template molecule with the Gene Writer driver polypeptide sequence.

### Example 14: Homology Arm Length Impacts Retrotransposition Efficiency

[0735] This example describes modulation of homology arms (HA) flanking a transgene to increase the frequency of an associated retrotransposition event.

[0736] Retrotransposition is believed to be mediated by priming events on the 3′ of an integrated transgene. Priming of the transgene RNA by the nicked host genomic DNA requires homology between the 3′ end of the transgene RNA and the genomic DNA 3′ to the host nick. Although the method of 5′ resolution of the retrotransposition is unknown, this resolution may also benefit from homology through host-mediated repair pathways. Additionally, processing of the 5′ end of the transgene RNA may affect retrotransposition, i.e. through ribozymal cleavage upstream of the 5′ UTR. Therefore, the flanking homology of the payload transgene was modulated in order to optimize retrotransposition.

[0737] Plasmid transfections were performed to test the effects of transgene homology on efficiency of integration in trans. Plasmid expressing R2Tg or control R2Tg with an endonuclease inactivating mutation were co-delivered with transgene plasmids containing differing lengths of target homology and optional random DNA stuffer sequence (Table E5 below, FIG. 20). Stuffer sequence was used to control for the effect of transcript length on retrotransposition. 500 ng total of plasmids at 1:4 molar ratio of driver:transgene plasmid was nucleofected into 2e5 293T cells via Lonza 4D shuttle with program DS-150. After 3 days, genomic DNA of the cells was isolated. Droplet digital PCR (ddPCR) was performed across each junction using a primer and Taqman probe specific for the transgene combined with a primer at the expected rDNA locus. The copy number found represents the efficiency of integration at the 3′ or 5′ end of the transgene.

[0738] Results are shown in FIG. 21. The construct tested with the longest homology (100 bp on either side) demonstrated the highest integration efficiency.

TABLE E5
Template constructs tested with varying lengths of homology at the 5′
and 3′ end, including stuffer sequence to maintain the total flanking
sequence at 100 bp on each end.

| 5′ Homology arm | 3′ Homology arm | Random stuffer presence |
|---|---|---|
| length (bp) | length (bp) | (to 100 bp) |
| 100 | 100 | n/a |
| 0 | 0 | N |
| 0 | 0 | Y |
| 5 | 5 | N |
| 5 | 5 | Y |
| 10 | 10 | N |
| 10 | 10 | Y |
| 20 | 20 | N |
| 20 | 20 | Y |
| 50 | 50 | N |
| 50 | 50 | Y |
| 90 | 90 | N |
| 90 | 90 | Y |

### Example 15: Homology Arm Tolerance and Specificity Impacts Retrotransposition Efficiency

[0739] This example describes the necessity for accurate alignment of homology arm design with nick location during retrotransposition.

[0740] Data from the Example 14 above highlights the importance of the homology arm for efficient retrotransposition. In many cases, the nicking location of a given retrotransposon may be poorly characterized. In these cases, the designed homology arm(s) may not initiate adjacent to the nick site in the genomic DNA. In order to evaluate the dependency of homology arm positioning on retrotransposition efficiency, we designed constructs with the 3′ homology arm shifted by a number of bases relative to the known cut site of R2Tg (Table E6 below, FIG. 22). In cases where the 3′ homology arm was shifted 3′ from the cut site (+), the homology arm was effectively shortened. In cases where the 3′ homology arm was shifted 5′ of the cut site, homologous bases were added from the 5′ arm.

[0741] Driver and transgene plasmids were co-transfected as in the above example into 293T cells. At day 3, genomic DNA was extracted. The integration frequency was measured as above via ddPCR. A significant loss in integration frequency was noted with a shifted 3′ homology arm in either position relative to the WT nick site (FIG. 23).

TABLE E6
Template constructs tested with varying positions of homology at the
3′ end, including relative shift of sequence position at the 3′ end.

| 5′ Homology | 3′ Homology arm | Right arm shift (relative to |
|---|---|---|
| arm length (bp) | length (bp) | expected nick site) |
| 100 | 100 | 0 |
| 100 | 99 | +1 |
| 100 | 97 | +3 |
| 100 | 95 | +5 |
| 100 | 90 | +10 |
| 100 | 101 | −1 |
| 100 | 103 | −3 |
| 100 | 105 | −5 |
| 100 | 110 | −10 |

### Example 16: Gene Writers can Integrate Genetic Cargo Independently of the Homology Directed Repair Pathway

[0742] This example describes the use of a Gene Writer system in a human cell wherein the homologous recombination repair pathway is inhibited.

[0743] In this example, U2OS cells were treated with 30 pmols (1.5 μM) non-targeting control siRNA (Ctrl) or a siRNA against Rad51, a core component of the homologous recombination repair pathway. SiRNAs were co-delivered with R2Tg driver and transgene plasmid in trans (see FIG. 24 for driver and transgene configuration schematic). Specifically, Plasmid expressing R2Tg, control R2Tg with a mutation in the RT domain, or control R2Tg with an endonuclease inactivating mutation were used in conjunction with transgene (FIG. 25 A, B). A total of 250 ng DNA plasmids with a 1:4 molar ration of driver to transgene, along with 30 pmol of siRNAs were nucleofected into 200 k U2OS cells resuspended in 20 μL of nucleofection buffer SE using pulse code DN100. Protein lysates collected on day 3 showed the absence of Rad51 in the siRad51 treated condition (FIG. 24C). gDNA was extracted at day 3 and ddPCR assays to detect transgene integration at the rDNA locus was performed. The results of the ddPCR copy number analysis (in comparison to reference gene RPP30) are shown in FIG. 25. The absence of Rad51 leads to a ˜20% reduction in R2Tg mediated transgene integration at the rDNA locus both at the 3′ and 5′ junctions (FIG. 25), indicating that R2TG mediated transgene insertion is not wholly dependent on the presence of the homologous recombination pathway, and can occur in the absence of the endogenous HR pathway. In some embodiments, HR independence enables Gene Writing to work in cells and tissues with endogenously low levels of HR, e.g., liver, brain, retina, muscle, bone, nerve, cells in G₀ or G₁ phase, non-dividing cells, senescent cells, terminally differentiated cells. In some embodiments, HR independence enables Gene Writing to work in cells or in patients or tissues containing cells with mutations in genes involved in the HR pathway, e.g., BRCA1, BRCA2, P53, RAD51.

### Example 17: Gene Writers can Integrate Genetic Cargo Independently of the Single-Stranded Template Repair Pathway

[0744] This example describes the use of a Gene Writer system in a human cell wherein the single-stranded template repair (SSTR) pathway is inhibited.

[0745] In this example, the SSTR pathway will be inhibited using siRNAs against the core components of the pathway: FANCA, FANCD2, FANCE, USP1. Control siRNAs of a non-target control will also be included. 200 k U2OS cells will be nucleofected with 30 pmols (1.5 μM) siRNAs, as well as R2Tg driver and transgene plasmids (trans configuration). Specifically, 250 ng of Plasmids expressing R2Tg, control R2Tg with a mutation in the RT domain, or control R2Tg with an endonuclease inactivating mutation) are used in conjunction with transgene at a 1:4 molar ratio (driver to transgene). Transfections of U2OS cells is performed in SE buffer using program DN100. After nucleofection, cells are grown in complete medium for 3 days. gDNA is harvested on day 3 and ddPCR is performed to assess integration at the rDNA site. Transgene integration at rDNA is detected in the absence of core SSTR pathway components.

### Example 18: Gene Writer Systems with Enhanced Activity for Target Vs Non-Target Cells

[0746] This example describes the incorporation of regulatory sequences into Gene Writer systems in order to decrease integration activity in non-target cells.

[0747] In this example, genetic regulation is accomplished through (i) using tissue-specific promoters to upregulate component expression and integration in target cells and (ii) using miRNA binding sites to decrease integration in non-target cells that have increased endogenous levels of the corresponding miRNA. Target cells used are human hepatocytes and non-target cells are hematopoetic stem cells (HSCs). The driver of integration here is a plasmid encoding the Gene Writer polypeptide (e.g., R2Tg retrotransposase) driven by different promoters and with scrambled or specific miRNA binding sites after the coding sequence. The template for integration is encoded on plasmid DNA, such that transcription results in a homology- and UTR-flanked heterologous object sequence. The heterologous object sequence may comprise a reporter gene that is driven by different promoters and with scrambled or specific miRNA binding sites after the coding sequence. The control promoter used here is CMV and the control for miRNA binding site is a randomly scrambled version of the binding site for miR-142. The target tissue-specific promoter used here is ApoE.HCR.hAAT, which is expressed in liver cells, and the off-target tissue-specific miRNA binding site is complementary to miR-142 (uguaguguuuccuacuuuaugga (SEQ ID NO: 1688)), which is expressed in HSCs.

[0748] Target cells and non-target cells are nucleofected with a combination of Gene Writer polypeptide (1) and template (2) selected from: (HEK293T vs HEK293T with miRNA?)

Gene Writer polypeptide constructs (1):

[0749] a. Non-specific driver: CMV-R2Tg

[0750] b. Non-specific inactivated driver: CMV-R2Tg(EN*)

[0751] c. Tissue-specific driver: ApoE.HCR.hAAT-R2Tg-miR142

[0752] d. Tissue-specific inactivated driver: ApoE.HCR.hAAT-R2Tg(EN*)-miR142

Gene Writer template constructs (2):

[0753] a. Non-specific transgene: CMV-gfp

[0754] b. Tissue-specific transgene: ApoE.HCR.hAAT-gfp-miR142

Cells are incubated for at least three days and subsequently evaluated for integration efficiency and reporter expression. For integration efficiency, ddPCR is performed to quantify the average number of integrations per genome for each sample. In some embodiments, the ratio between the integration efficiency in target cells and non-target cells is higher when using a template paired with the tissue-specific driver (1a) vs a non-specific driver (1c). To assess reporter expression, cells are analyzed by flow cytometry to detect GFP fluorescence and RT-qPCR to detect transcription. In some embodiments, the ratio between fluorescence in target cells and non-target cells is higher when using a driver paired with a tissue-specific transgene cassette (2b) vs a non-specific transgene cassette (2a). In some embodiments, the ratio between transcript levels in target cells and non-target cells is higher when using a driver paired with a tissue-specific transgene cassette (2b) vs a non-specific transgene cassette (2a). In some embodiments, the combination of a tissue-specific driver (1a) with a tissue-specific transgene cassette (2b) results in the highest ratio of transcription or expression between target and non-target cells.

### Example 19: Application of a Gene Writer™ System for Delivering Therapeutic Gene to Liver in a Human Chimeric Liver Mouse Model

[0755] This example describes a Gene Writer™ genome editing system delivered to the liver in vivo for integration and stable expression of a genetic payload. The promoter and miRNA recognition sequence for expression control and the therapeutic gene are intended to exemplify the approach and are selected from Table 2 of WO2020014209, incorporated herein by reference, and Tables 3 and 4 of WO2020014209, respectively.

[0756] In this example, human hepatocytes derived from patients with OTC deficiency are engrafted into a mouse model (Ginn et al JHEP Reports 2019) and a Gene Writer™ system is used to deliver an OTC expression cassette for integration into liver cells. The Gene Writer™ polypeptide component comprises an expression cassette for the R2Tg retrotransposase (Table 3) and the template component comprises an expression cassette for the human OTC gene (Table 5 of WO2020014209) flanked by the UTR sequences required for binding and retrotransposition by R2Tg (Table 3) and further flanked by 100 nt homology to the target site in ribosomal DNA. In this example, both the transposase and template expression cassettes additionally comprise the hAAT promoter (Table 3 of WO2020014209) for hepatocyte-specific expression and a miRNA recognition sequence complementary to the seed sequence of miR-142 (Table 4 of WO2020014209) for downregulating expression in hematopoetic cells.

[0757] 1. Gene Writer™ polypeptide component: rAAV2/NP59.hAAT.R2Tg

[0758] 2. Endonuclease-mutated Gene Writer™ polypeptide: rAAV2/NP59.hAAT.R2TgEN*

[0759] 3. Gene Writer™ template component: rAAV2/NP59.hAAT.OTC

[0760] 4. Reporter Gene Writer™ template component: rAAV2/NP59.hAAT.GFP

Eight to 12-week-old female Fah^{-/-}Rag2^{-/-}Il2rg^{-/-} (FRG) mice are engrafted with human hepatocytes, isolated from pediatric donors or purchased from Lonza (Basel, Switzerland), as described previously (Azuma et al Nat Biotechnol 2007). Engrafted mice are cycled on and off 2-(2-nitro-4-trifluoro-methylbenzoyl)-1,3-cyclohexanedione (NTBC) in drinking water to promote liver repopulation. Blood is collected every two weeks and at the end of the experiment to measure the levels of human albumin, used as a marker to estimate the level of engraftment, in serum by enzyme-linked immunosorbent assay (ELISA; Bethyl Laboratories, Inc., Montgomery, Tex.). Eleven weeks after engraftment, mice are treated with the Gene Writer™s packaged in NP59, a highly human hepatotropic AAV capsid. The following vectors are administered by i.p. injection:
[0761] Active Gene Writing™ of therapeutic: (1) and (3)
[0762] Active Gene Writing™ of reporter: (1) and (4)
[0763] Integration-inactivated therapeutic control: (2) and (3)
[0764] Integration-inactivated reporter control: (2) and (4)
   After vector injection, mice are cycled on NTBC for another 5 weeks before being euthanized. DNA and RNA are subsequently extracted from liver lysates by standard methods. OTC expression is subsequently assayed by performing RT-qPCR on isolated RNA samples using sequence-specific primers. To confirm integration of construct and analyze genomic locations, unidirectional sequencing is performed on genomic DNA samples by using specific primers annealing to the inserted gene to read outward into the surrounding genomic sequence on a MiSeq.

### Example 20: Application of a Gene Writer™ System for Delivering Therapeutic Gene to Liver in an Infant or Adult Mouse Model of a Disease

[0765] This example describes a Gene Writer™ genome editing system delivered to the liver in vivo for integration and stable expression of a genetic payload. The promoter and miRNA recognition sequence for expression control and the therapeutic gene are intended to exemplify the approach and are selected from Tables 2, 3, and 4 of WO2020014209, respectively.

[0766] In this example, an OTC deficient mouse model is used to assess a Gene Writer™ system designed to deliver an OTC expression cassette for integration into liver cells. The Gene Writer™ polypeptide component comprises an expression cassette for the the R2Tg retrotransposase (Table 3) and the template component comprises an expression cassette for the human OTC gene (Table 5 of WO2020014209) flanked by the UTR sequences required for binding and retrotransposition by R2Tg (Table 3) and further flanked by 100 nt homology to the target site in ribosomal DNA. In this example, both the transposase and template expression cassettes additionally comprise the hAAT promoter (Table 3 of WO2020014209) for hepatocyte-specific expression and a miRNA recognition sequence complementary to the seed sequence of miR-142 (Table 4 of WO2020014209) for downregulating expression in hematopoetic cells.

[0767] 1. Gene Writer™ polypeptide component: rAAV2/8.hAAT.R2Tg

[0768] 2. Endonuclease-mutated Gene Writer™ polypeptide: rAAV2/8.hAAT.R2TgEN*

[0769] 3. Gene Writer™ template component: rAAV2/8.hAAT.OTC

[0770] 4. Reporter Gene Writer™ template component: rAAV2/8.hAAT.GFP

Either one to two day-old or eight to 12-week-old female Ote-deficient Spf^{ash} mice (C57BL/6/C3H-F1 background) are treated with the Gene Writer™s packaged in AAV8, a hepatotropic AAV capsid. The following vectors are administered by i.p. injection:
[0771] Active Gene Writing™ of therapeutic: (1) and (3)
[0772] Active Gene Writing™ of reporter: (1) and (4)
[0773] Integration-inactivated therapeutic control: (2) and (3)
[0774] Integration-inactivated reporter control: (2) and (4)
   After 5 weeks, DNA and RNA are subsequently extracted from liver lysates by standard methods. OTC expression is subsequently assayed by performing RT-qPCR on isolated RNA samples using sequence-specific primers. To confirm integration of construct and analyze genomic locations, unidirectional sequencing is performed on genomic DNA samples by using specific primers annealing to the inserted gene to read outward into the surrounding genomic sequence on a MiSeq.

### Example 21: Ribozyme and Homology Arm Sequence Compatibility at Re-Targeted Sites

[0775] This example describes a gene writer template molecule that is used in conjunction with a mutant gene writer polypeptide sequence that targets a genomic location that is outside of its natural genomic target site. Endogenous sequences of retrotransposon RNA contain a ribozyme at the 5′ end of their RNA, which is only active if the RNA forms the correct secondary structure or folding of the RNA (Eickbush, D. G., et. al, Molecular and Cellular Biology, 30 (13), 3142-3150, 2010; Eickbush, D. G., et. al., PLoS ONE, 8(9), 1-16, 2013; Ruminski, D. J., et. al., Journal of Biological Chemistry, 286(48), 41286-41295, 2011). In order for the active form of the retrotransposon ribozyme to form the correct structure, the RNA of some retrotransposons must contain part of the 28S ribosomal RNA in order for the proper secondary structure of the P1 stem of the ribozyme to form (Eickbush, D. G., et. al., PLoS ONE, 8(9), 1-16, 2013).

[0776] The portion of the endogenous retrotransposon RNA that is the 28S ribosomal RNA that interacts with the 5′ UTR of the retrotransposon RNA is analogous to the gene writer template molecule (FIG. 18 modularity) where a portion of the sequence in module A interacts with a portion of the sequence of module B of the gene writer template molecule. In order for module B to be an active ribozyme it needs to fold into a proper secondary structure, the P1′ portion of the ribozyme found in module B interact with some complementarity to the P1 sequence of the ribozyme found in module A. In some embodiments where the 5′ homology arms of the gene writer template molecule (module A) are required for integration activity along with having an active ribozyme (module B), the sequence of the P1′ sequence of the ribozyme found in module B, is changed to have some complementarity to the sequence found in module A where the P1 sequence is. The nucleotide lengths of complementarity between the P1 sequence found in module A and the P1′ sequence of module B may vary between 0-100 nucleotides. In some embodiments, if the re-targeted gene writer polypeptide sequence is based off of the R2 element from Taeniopygia guttata, nucleotides 49-54 of module B of the gene writer template molecule interact through complete or partial complementary to the last 28 nucleotides of module A, where module A is the homology arm that has complementarity to a genomic location that is compatible with a mutant Gene Writer polypeptide sequence that targets the genomic region to which module A has complementarity (FIG. 28 predicted ribozyme).

### Example 22: Gene Writing Integrates the Specific Template Sequence

[0777] This example describes analyzing the insertions completed by a Gene Writing system in order to assay for unintentional incorporation of non-template RNA, e.g., cellular endogenous RNA, into the target site.

[0778] In this example, a Gene Writing system is used as described in previous examples in order to integrate a template RNA into a target site in HEK293 cells. HEK293 are transfected with the following reagents:
[0779] 1. mRNA encoding Gene Writer polypeptide
[0780] 2. mRNA encoding inactivated Gene Writer polypeptide (e.g., R2Tg reverse transcriptase mutant)
[0781] 3. Gene Writer RNA template (e.g., comprising 5′-3′: 5′HA-5′UTR-GFP cassette-3′UTR-3′HA)
[0782] 4. Gene Writer RNA template without binding motif (e.g., comprising 5′-3′: 5′HA-GFP cassette-3′HA)
   After 3 days of incubation, genomic DNA is extracted and analyzed for insertion frequency by ddPCR, as described elsewhere herein. In some embodiments, the combination of (1) and (2) will result in integration of the template. In some embodiments, the combination of (1) and (4) will not result in detectable integration of the template, since template (4) does not possess a polypeptide binding motif, e.g., the 3′UTR from the R2Tg retrotransposon. In some embodiments, (1) and (4) will result in an integration frequency that is less than the frequency of integration with (1) and (2), e.g., is less than 10%, 5%, 4%, 3%, 2%, 1%, 0.05%, or 0.01%.

[0783] To further analyze all incorporated sequences, amplicon-seq is performed on cells derived from transfecting (1) and (2) by using PCR to amplify across the junction of the target site. Optionally, negative selection against unedited target sites can be performed by digesting specifically at the junction of an unedited target site (nicking site of the Gene Writer) in order to improve signal. Amplicons are processed for next generation sequencing on an Illumina MiSeq, as described previously. Unintentional incorporations are discovered by looking for reads that contain an inserted sequence, e.g., at least 100 nt, of new DNA that does not map to the template RNA. Optionally, the insertion is compared to the human transcriptome to determine the source of any transcript unintentionally incorporated into the target site. In some embodiments, the Gene Writing system will not incorporate any templates into the target site that are not the Gene Writing template RNA. In some embodiments, the Gene Writing system will not incorporate any templates into the target site that are not the Gene Writing template RNA at a level greater than 1% of the total insertions.

### Example 23: Gene Writer™ Enabling Nucleotide Substitution in Genomic DNA to Correct Alpha-1 Antitrypsin Deficiency Mutation in Human Cells

[0784] This example describes the use of a Gene Writer™ gene editing system to alter a genomic sequence at a single nucleotide.

[0785] In this example, the Gene Writer™ polypeptide and writing template are provided as DNA transfected into HEK293T cells that possess the PiZ genotype (E342K), a common allele associated with alpha-1 antitrypsin deficiency. The Gene Writer™ polypeptide uses a Cas9 nickase for both DNA-binding and endonuclease functions. The writing template is designed to have homology to the target sequence, while incorporating additional nucleotides at the desired position, such that reverse transcription of the template RNA results in the generation of a new DNA strand containing the substitution.

[0786] To create the transversion in the affected human SERPINA1 gene that restores the GAG triplet coding for glutamate in healthy patients, the Gene Writer™ polypeptide is used with a specific template nucleic acid, which encodes a gRNA scaffold for polypeptide binding, a spacer for polypeptide homing, target homology domain to set up TPRT, and a template sequence for reverse transcription that includes the required substitution. An exemplary template RNA carries the sequence (1)TCCCCTCCAGGCCGTGCATA(2)GTTTTAGAGCTAGAAATAGCAAGTTAAAATAAG GCTAGTCCGTTATCAACTTGAAAAAGTGGGACCGAGTCGGTCC(3)TcGTCGATGGTC AGCACAGCCTTAT(4)GCACGGCCTGGA (SEQ ID NO: 1689), where numbers are used to delineate the modules of the template in the order (5′-3′) (1) gRNA spacer, (2) gRNA scaffold, (3) heterologous object sequence, (4) 3′ homology priming domain, and the lowercase “c” indicates the position in the template carrying the nucleotide substitution to be written into the target site to correct the E342K mutation. An exemplary gRNA for providing a second nick as described in embodiments of this system comprises the spacer sequence TTTGTTGAACTTGACCTCGG (SEQ ID NO: 1625) and directs a Cas9 nickase to nick the second strand of the target site within the homologous region. In some embodiments, this second nick improves the efficiency of the edit.

After transfection, cells are incubated for three days to allow for expression of the Gene Writing™ system and conversion of the genomic DNA target, and genomic DNA is extracted from cells. Genomic DNA is then subjected to PCR-based amplification using site-specific primers and amplicons are sequenced on an Illumina MiSeq according to manufacturer's protocols. Sequence analysis is then performed to determine the frequency of reads containing the desired edit.

### Example 24: Correction of Alpha-1 Antitrypsin Deficiency Using Lipid Nanoparticles Comprising Gene Writers

[0787] This example describes the use of a Gene Writer™ gene editing system to alter a genomic sequence at a single nucleotide in vivo. More specifically, the Gene Writer™ polypeptide and writing template are delivered to mouse liver cells via lipid nanoparticles to correct the SERPINA1 PiZ mutation causing alpha-1 antitrypsin deficiency.

[0788] Formulation and treatment of murine models with LNPs (LNP-INTO1 system) carrying Cas9 and gRNA are taught by Finn et al. Cell Reports 22:2227-2235 (2018), the methods of which are incorporated herein by reference.

[0789] Capped and polyadenylated Gene Writer polypeptide mRNA containing N1-methyl pseudo-U is generated by in vitro transcription using a linearized plasmid DNA template and T7 RNA polymerase. The polypeptide mRNA is purified from enzyme and nucleotides using a MegaClear Transcription Clean-up Kit, in accordance with the manufacturer's protocol (ThermoFisher). The transcript concentration is determined by measuring the light absorbance at 260 nm (Nanodrop), and the transcript is analyzed by capillary electrophoresis by TapeStation (Agilent). Template RNA comprising the mutation correcting sequence is also prepared by in vitro transcription and translation using similar methods. In this example, the template RNA comprises the sequence as exemplified in Example 1.

[0790] LNPs are formulated with an amine-to-RNA-phosphate (N:P) ratio of 4.5. The lipid nanoparticle components are dissolved in 100% ethanol with the following molar ratios: 45 mol % LP01 lipid, 44 mol % cholesterol, 9 mol % DSPC, and 2 mol % PEG2k-DMG. The RNA cargo (1:40 molar ratio of polypeptide mRNA:template RNA) is dissolved in 50 mM acetate buffer (pH 4.5), resulting in a concentration of RNA cargo of approximately 0.45 mg/mL. LNPs are formed by microfluidic mixing of the lipid and RNA solutions using a Precision Nanosystems NanoAssemblr Benchtop Instrument, in accordance with the manufacturer's protocol. After mixing, the LNPs are collected and diluted in PBS (approximately 1:1), and then the remaining buffer is exchanged into PBS (100-fold excess of sample volume) overnight at 4C under gentle stirring using a 10 kDa Slide-a-Lyzer G2 Dialysis Cassette (ThermoFisher Scientific). The resultant mixture is then filtered using a 0.2-mm sterile filter. The filtrate is stored at 2C-8 C. Multi-dose formulations may be formulated using 25 mM citrate, 100 mM NaCl cargo buffer (pH 5), and buffer exchanged by TFF into tris-saline sucrose buffer (TSS) buffer (5% sucrose, 45 mM NaCl, and 50 mM Tris). Formulated LNPs have an average size of 105 nm. Encapsulation efficiencies are determined by ribogreen assay (Leung et al., 2012). Particle size and polydispersity are measured by dynamic light scattering (DLS) using a Malvern Zetasizer DLS instrument.

[0791] NSG-PiZ mice carrying the human SERPINA1 PiZ allele (E342K) are acquired from The Jackson Laboratory. To assess the ability of Gene Writing to edit the mutant allele in vivo, LNPs are dosed via the lateral tail vein at 3 mg/kg in a volume of 0.2 mL per animal. Excipient-treated animals are used as negative controls for all studies. Animals are euthanized at various time points by exsanguination via cardiac puncture under isoflurane anesthesia. In some embodiments, animals are euthanized at one week post-treatment to be analyzed for Gene Writing. Liver tissue is collected from the median or left lateral lobe from each animal for DNA extraction and analysis.

[0792] For NGS analysis of editing efficiency, PCR primers are designed around the target site, and the region of interest is amplified from extracted genomic DNA. Additional PCR is performed in accordance with the manufacturer's protocols (Illumina) to add the appropriate chemistry for sequencing, and amplicons are then sequenced on an Illumina MiSeq. Sequencing reads are aligned to the mouse reference genome after eliminating those having low quality scores. The resultant files containing the reads are mapped to the reference genome (BAM files), where reads that overlap the target region of interest are selected, and the number of wild-type reads versus the number of reads that contain the SERPINA1 reversion mutation encoded in the template RNA are calculated. The editing percentage (e.g., the “editing efficiency” or “percent editing”) is defined as the total number of reversion sequence reads over the total number of sequence reads.

[0793] In some embodiments, this example is repeated with additional groups of mice and a redosing regimen is used to analyze dose-to-effect properties of the system. In these experiments, mice are assigned to groups for weekly dosing up to 4 weeks, with euthanasia and tissue analysis as described herein being performed each week. In some embodiments, mice that receive more doses of the LNP formulation demonstrate higher Gene Writing efficiency by sequencing, e.g., mice receiving 2 doses one week apart that are analyzed at week three show a higher fraction of gene corrected reads by NGS of liver tissue samples as compared to mice receiving a single dose and analyzed at week three. In application, dosing in this manner may allow tuning of therapeutic intervention after evaluating patient response to one or more doses.

### Example 25: Using Gene Writing to Address Repeat Expansion Diseases

[0794] This example describes the use of a Gene Writer™ gene editing system to treat a repeat expansion disease by rewriting a normal number of repeats into the locus. More specifically, the Gene Writer™ polypeptide and writing template are delivered to mouse CNS via AAV to reset the CAG repeats in HTT as per the custom template RNA to cure Huntington Disease. Healthy humans tend to carry between 10 and 35 CAG repeats within the huntingtin gene (HTT), while those with Huntington Disease may possess between 36 to greater than 120 repeats.

[0795] In this example, the template RNA is designed to correct the CAG repeat region of the HTT gene by encoding a sequence with 10 such repeats and homology to the flanking target sequence to fully write across the target locus. Multiple examples of such template RNAs could be designed, with an exemplary template RNA, as encoded in DNA, comprising the sequence (1)GGCGGCTGAGGAAGCTGAGG(2)GTTTTAGAGCTAGAAATAGCAAGTTAAAATAA GGCTAGTCCGTTATCAACTTGAAAAAGTGGGACCGAGTCGGTCC(3)AGTCCCTCAAG TCCTTCcagcagcagcagcagcagcagcagcagcagccgccaccgccgccgccgccgccgccgcctcct(4)CAGCTTCC TCAG(SEQ ID NO: 1690), where numbers are used to delineate the modules of the template in the order (5′-3′) (1) gRNA spacer, (2) gRNA scaffold, (3) heterologous object sequence, (4) 3′ homology priming domain, with the repeat correction being encoded in (3). The CAG repeat region is followed by a short repeat region encoding for 11 proline residues (8 residues being encoded by CCG triplets). Without wishing to be bound by theory, this region is included in (3) to place (4) in a more unique region to prevent mispriming. An exemplary gRNA for providing a second nick as described in embodiments of this system comprises the spacer sequence CGCTGCACCGACCGTGAGTT (SEQ ID NO: 1647) and directs a Cas9 nickase to nick the second strand of the target site within the homologous region. In some embodiments, this second nick improves the efficiency of the edit.

[0796] In order to deliver a complete Gene Writing system to the CNS, in this example, the Gene Writer is split across two AAV genomes, with the first encoding the nickase Cas9 domain fused to intein-N of a split intein pair (DnaE Intein-N: CLSYETEILTVEYGLLPIGKIVEKRIECTVYSVDNNGNIYTQPVAQWHDRGEQEVFEYCL EDGSLIRATKDHKFMTVDGQMLPIDEIFERELDLMRVDNLPN(SEQ ID NO: 1613)) and the second encoding the RT domain fused to an intein-C of a split intein pair (DnaE Intein-C, MIKIATRKYLGKQNVYDIGVERDHNFALKNGFIASN(SEQ ID NO: 1615)) and the template RNA. The two polypeptide components are expressed from a polymerase II promoter, e.g. a neuronal cell-specific promoter described herein, and the template RNA and gRNA for providing a second nick are expressed from a polymerase III promoter, e.g. a U6 promoter. When co-infecting a cell, the two polypeptide components reconstitute a complete Gene Writer polypeptide with N-terminal Cas9 and C-terminal RT and the template RNA is expressed and reverse transcribed into the target locus. To achieve delivery for cells of the CNS (specifically the claudate nucleus and the putamen of the basal ganglia), the pseudotyped system rAAV2/1 is used here, where the AAV2 ITRs are used to package the described nucleic acids into particles with AAV1 capsid. AAV preparation and mouse injection and harvesting protocols used here follow the teachings of Monteys et al. Mol Ther 25(1):12-23 (2017).

[0797] FVB-Tg(YAC128)53Hay/J mice are acquired from The Jackson Laboratory. These transgenic mice express the full-length human huntingtin protein with ˜118 glutamine repeats (CAG trinucleotide repeats) and develop hyperkinesis at three months of age. At 8 weeks of age, mice are treated with a combination 1:1 of rAAV2/1-Cas9 virus and rAAV-MMLV_RT/hU6templateRNA virus. For rAAV injections, mice are anesthetized with isoflurane and 5 μL of rAAV mixture injected unilaterally into the right striata at 0.2 μL/min. After three weeks, mice are sacrificed and brain tissue taken for genomic DNA extraction and NGS analysis.

[0798] For NGS analysis of editing efficiency, PCR primers are designed flanking the target site, and the region of interest is amplified from extracted genomic DNA. Additional PCR is performed in accordance with the manufacturer's protocols (Illumina) to add the necessary chemistry for sequencing, and amplicons are then sequenced on an Illumina MiSeq. Sequencing reads are aligned to the mouse reference genome after eliminating those having low quality scores. The resultant files containing the reads are mapped to the reference genome (BAM files), where reads that overlap the target region of interest are selected, and the number of diseased allele (>35 CAG repeats) reads versus the number of repaired allele (10-35 CAG repeats) reads are calculated. The editing percentage (e.g., the “editing efficiency” or “percent editing”) is defined as the total number of repaired reads, as defined above, over the total number of sequence reads.

### Example 26: Delivery of a Gene Writing System by LNP and AAV Vehicles

[0799] This example describes the use of a Gene Writer™ gene editing system to alter a genomic sequence at a single nucleotide in vivo. More specifically, the Gene Writer™ polypeptide and writing template are delivered to mouse liver cells via a combination of lipid nanoparticles (mRNA encoding polypeptide) and AAV (DNA encoding the RNA template) to correct the SERPINA1 PiZ mutation causing alpha-1 antitrypsin deficiency.

[0800] Capped and tailed mRNA encoding the Gene Writer polypeptide are prepared by in vitro transcription and formulated into LNP-INT01 as described in Example 23, but without template RNA co-formulation.

[0801] In this example, the template RNA is encoded as DNA and delivered via AAV. The teachings of Cunningham et al. Mol Ther 16(6):1081-1088 (2008) describe the use of rAAV2/8 with the human alpha-1 antitrypsin (hAAT) promoter and two copies of the hepatic control region of the apolipoprotein E enhancer (ApoE) to effectively transduce and drive expression of cargo in juvenile mouse liver. Accordingly, rAAV2/8.ApoE-hAAT.PiZ (rAAV2/8.PiZ) as described here comprises the above described AAV and promoter system driving expression of an RNA template for correcting the PiZ mutation, in addition to a second nick-directing gRNA being driven by a U6 promoter (RNA sequences previously described in Example 1).

[0802] NGS-PiZ mice carrying the human SERPINA1 PiZ allele (E342K) are acquired from The Jackson Laboratory. To assess the activity of Gene Writing to edit the mutant allele in vivo, 8-week-old mice are dosed i.p. with ˜10¹¹ vg of rAAV2/8.PiZ to express the template RNA and via the lateral tail vein with formulated LNPs at 3 mg/kg in a volume of 0.2 mL per animal to express the Gene Writer polypeptide. Animals are euthanized at various time points by exsanguination via cardiac puncture under isoflurane anesthesia. In some embodiments, animals are euthanized at one week post-treatment to be analyzed for Gene Writing. Liver tissue is collected from the median or left lateral lobe from each animal for DNA extraction and analysis.

[0803] For NGS analysis of editing efficiency, PCR primers are designed around the target site, and the region of interest is amplified from extracted genomic DNA. Additional PCR is performed in accordance with the manufacturer's protocols (Illumina) to add the necessary chemistry for sequencing, and amplicons are then sequenced on an Illumina MiSeq. Sequencing reads are aligned to the mouse reference genome after eliminating those having low quality scores. The resultant files containing the reads are mapped to the reference genome (BAM files), where reads that overlap the target region of interest are selected, and the number of wild-type reads versus the number of reads that contain the SERPINA1 reversion mutation encoded in the template RNA are calculated. The editing percentage is defined as the total number of reversion sequence reads over the total number of sequence reads.

### Example 27: Application of a Gene Writer™ System for Delivering Therapeutic Gene to Liver in a Human Chimeric Liver Mouse Model

[0804] This example describes a Gene Writer™ genome editing system delivered to the liver in vivo for integration and stable expression of a genetic payload. Specifically, LNPs are used to deliver a Gene Writing system capable of integrating a complete OTC expression cassette to treat a humanized mouse model of OTC-deficiency.

[0805] In this example, a Gene Writing system is used to treat a humanized mouse model of OTC deficiency, in which human hepatocytes derived from patients with OTC deficiency are engrafted into a mouse model (Ginn et al JHEP Reports 2019). An exemplary Gene Writing system for large payload integration comprises a Cas9-directed reverse transcriptase system utilizing a highly processive reverse transcriptase, e.g., MarathonRT. An exemplary template RNA component comprises, from 5′ to 3′, (1) a gRNA spacer with homology to the AAVS1 safe harbor site, (2) a gRNA scaffold, (3) a heterologous object sequence, and (4) a 3′ target homology region for annealing to the genomic DNA immediately upstream of the first strand nick to prime TPRT of the heterologous object sequence. An exemplary sequence for (1) is GGGGCCACTAGGGACAGGAT(SEQ ID NO: 1691). Region (2) carries the gRNA scaffold as described in this application, generally comprising the sequence GTTTTAGAGCTAGAAATAGCAAGTTAAAATAAGGCTAGTCCGTTATCAACTTGAAAA AGTGGGACCGAGTCGGTCC (SEQ ID NO: 1603). In this example, (3) comprises a complete OTC expression cassette, where a liver-codon-optimized sequence encoding human OTC (UniProt P00480) is in operable association with the ApoE.hAAT promoter system as described in Example 25. An exemplary sequence for (4) is CTGTCCCTAGTG (SEQ ID NO: 1692). An exemplary sequence of an additional gRNA spacer for generating a second strand nick to improve the efficiency of integration is AGAGAGATGGCTCCAGGAAA(SEQ ID NO: 1693).

[0806] Eight to 12-week-old female Fah^{-/-}Rag2^{-/-}Il2rg^{-/-} (FRG) mice are engrafted with human hepatocytes, isolated from pediatric donors or purchased from Lonza (Basel, Switzerland), as described previously (Azuma et al Nat Biotechnol 2007). Engrafted mice are cycled on and off 2-(2-nitro-4-trifluoro-methylbenzoyl)-1,3-cyclohexanedione (NTBC) in drinking water to promote liver repopulation. Blood is collected every two weeks and at the end of the experiment to measure the levels of human albumin, used as a marker to estimate the level of engraftment, in serum by enzyme-linked immunosorbent assay (ELISA; Bethyl Laboratories, Inc., Montgomery, Tex.). Eleven weeks after engraftment, mice are treated with the Gene Writer™s formulated as in Example 23. For treatment, LNPs are delivered via the lateral tail vein at 3 mg/kg in a volume of 0.2 mL per animal.

[0807] After vector injection, mice are cycled on NTBC for another 5 weeks before being euthanized. DNA and RNA are subsequently extracted from liver lysates by standard methods. OTC expression is subsequently assayed by performing RT-qPCR on isolated RNA samples using sequence-specific primers. Levels of human OTC are also measured throughout the experiment by using a human OTC ELISA kit (e.g., Aviva Systems Biology OTC ELISA Kit (Human) (OKCD07437)) on serum at Days −7, 0, 2, 4, 7, 14, 21, 28, and 35 post-injection, following the manufacturer's recommended protocol.

[0808] For analysis of editing efficiency, a ddPCR assay is performed using a pair of primers that anneal across either the 5′ junction or the 3′ junction of integration, with one primer in each set annealing to the heterologous object sequence, and the other to an appropriate region of the AAVS1 site on the genome. The assay is normalized to a reference gene to quantify the number of target site integrations per genome.

[0809] To analyze integrations at the target site, long-read sequencing across the integration site is performed. PCR primers are designed flanking the target site, and the region of interest is amplified from extracted genomic DNA. Additional PCR is performed in accordance with the manufacturer's protocols (PacBio) to add the necessary chemistry for sequencing, and amplicons are then sequenced via PacBio. Sequencing reads are aligned to the mouse reference genome after eliminating those having low quality scores. The resultant files containing the reads are mapped to the reference genome (BAM files), where reads that contain an insertion sequence relative to the reference genome are selected for further analysis to determine completeness of integration, defined in this example as containing the complete promoter and coding sequence of OTC.

### Example 28: Gene Writers for Integration of a CAR in T-Cells Ex Vivo

[0810] This example describes delivery of a Gene Writer™ genome editing system to T-cells ex vivo for integration and stable expression of a genetic payload. Specifically, LNPs are used to deliver a Gene Writing system capable of integrating a chimeric antigen receptor (CAR) into the TRAC locus to generate CAR-T cells for treating B-cell lymphoma.

[0811] In this example, a Gene Writing system comprises a Gene Writing polypeptide, e.g., a nickase Cas9 and R2Tg reverse transcriptase domain, as described herein, a gRNA for directing nickase activity to the target locus, and a template RNA comprising, from 5′ to 3′:

(1) 100 nt homology to target site 3′ of first strand nick
(2) 5′ UTR from R2Tg
(3) Heterologous object sequence
(4) 3′ UTR from R2Tg
(5) 100 nt homology to target site 5′ of first strand nick
Wherein (3) comprises the coding sequence for the CD19-specific Hu19-CD828Z (Genbank MN698642; Brudno et al. Nat Med 26:270-280 (2020)) CAR molecule. The Gene Writer in this example is guided to the 5′ end of the first exon of TRAC by using a targeted gRNA, e.g., TCAGGGTTCTGGATATCTGT(SEQ ID NO: 1694), in order to place the cargo under endogenous expression control from that locus while disrupting the endogenous TCR, as taught by Eyquem et al. Nature 543:113-117 (2017). These three components (polypeptide, gRNA, and template) all comprise RNA, which is synthesized by in vitro transcription (e.g., polypeptide mRNA, template RNA) or chemical synthesis (gRNA).

[0812] The LNP formulation used in this example has been screened and validated for delivery to T-cells ex vivo, being taught in Billingsley et al. Nano Lett 20(3):1578-1589 (2020), which is incorporated herein by reference in its entirety. Specifically, the LNP formulation C14-4, comprising cholesterol, phospholipid, lipid-anchored PEG, and the ionizable lipid C14-4 (FIG. 2C of Billingsley et al. Nano Lett 20(3):1578-1589 (2020)) was used to encapsulate all three RNA components in a molar ratio of polypeptide mRNA:gRNA:template RNA of about 1:40:40.

[0813] Additional edits can be performed on T-cells in order to improve activity of the CAR-T cells against their cognate target. In some embodiments, a second LNP formulation of C14-4 as described comprises a Cas9/gRNA preformed RNP complex, wherein the gRNA targets the Pdcd1 exon 1 for PD-1 inactivation, which can enhance anti-tumor activity of CAR-T cells by disruption of this inhibitory checkpoint that can otherwise trigger suppression of the cells (see Rupp et al. Sci Rep 7:737 (2017)). The application of both nanoparticle formulation thus enables lymphoma targeting by providing the anti-CD19 cargo, while simultaneously boosting efficacy by knocking out the PD-1 checkpoint inhibitor. In some embodiments, cells may be treated with the nanoparticles simultaneously. In some embodiments, the cells may be treated with the nanoparticles in separate steps, e.g., first deliver the RNP for generating the PD-1 knockout, and subsequently treat cells with the nanoparticles carrying the anti-CD19 CAR. In some embodiments, the second component of the system that improves T cell efficacy may result in the knockout of PD-1, TCR, CTLA-4, HLA-I, HLA-II, CS1, CD52, B2M, MHC-I, MHC-II, CD3, FAS, PDC1, CISH, TRAC, or a combination thereof. In some embodiments, knockdown of PD-1, TCR, CTLA-4, HLA-I, HLA-II, CS1, CD52, B2M, MHC-I, MHC-II, CD3, FAS, PDC1, CISH, or TRAC may be preferred, e.g., using siRNA targeting PD-1. In some embodiments, siRNA targeting PD-1 may be achieved using self-delivering RNAi as described by Ligtenberg et al. Mol Ther 26(6):1482-1493 (2018) and in WO2010033247, incorporated herein by reference in its entirety, in which extensive chemical modifications of siRNAs, conferring the resulting hydrophobically modified siRNA molecules the ability to penetrate all cell types ex vivo and in vivo and achieve long-lasting specific target gene knockdown without any additional delivery formulations or techniques. In some embodiments, one or more components of the system may be delivered by other methods, e.g., electroporation. In some embodiments, additional regulators are knocked in to the cells for overexpression to control T cell- and NK cell-mediated immune responses and macrophage engulfment, e.g., PD-L1, HLA-G, CD47 (Han et al. PNAS 116(21):10441-10446 (2019)). Knock-in may be accomplished through application of an additional Gene Writing system with a template carrying an expression cassette for one or more such factors (3) with targeting to a safe harbor locus, e.g., AAVS1, e.g., using gRNA GGGGCCACTAGGGACAGGAT (SEQ ID NO: 1691) to target the Gene Writer polypeptide to AAVS1.

[0814] LNPs are used to treat primary T cells activated by Dynabeads at a 1:1 CD4+:CD8+ratio at 450 ng/μL total mRNA concentrations. The resulting T cell populations are analyzed for integration, expression, and effect. For assessing integration, ddPCR is used with primers producing an amplicon extending from within the integrated CAR to the flanking genomic TRAC sequence. Comparing signal to a reference gene (e.g., RPP30), allows quantification of the average copy number per genome and integration efficiency. To analyze expression, flow cytometry with immunological probes is used to assess the level and percent of cells displaying surface CAR expression. To analyze activity of the CAR-T cells, treated cells are assessed via a co-plated cancer cell killing assay. By engineering Nalm6 ALL cells to express luciferase, cancer cell killing can be assessed by change in luminescence after co-culture with CAR-T cells as compared to signal from Nalm6 cells alone Billingsley et al. Nano Lett 20(3):1578-1589 (2020). Thus, a Gene Writing system can be used to generate CAR-T cells ex vivo with the desired cytotoxic activity.

### Example 29: Gene Writers for Integration of a CAR in T-Cells In Vivo

[0815] This example describes a Gene Writer™ genome editing system delivered T-cells in vivo for integration and stable expression of a genetic payload. Specifically, targeted nanoparticles are used to deliver a Gene Writing system capable of integrating a chimeric antigen receptor (CAR) expression cassette into the murine Rosa26 locus to generate CAR-T cells in a murine model.

[0816] In this example, a Gene Writing system comprises a Gene Writing polypeptide, e.g., a nickase Cas9 and R2Tg reverse transcriptase domain, as described herein, a gRNA for directing nickase activity to the target locus, and a template RNA comprising, from 5′ to 3′:

[0817] (1) 100 nt homology to target site 3′ of first strand nick

[0818] (2) 5′ UTR from R2Tg

[0819] (3) Heterologous object sequence

[0820] (4) 3′ UTR from R2Tg

[0821] (5) 100 nt homology to target site 5′ of first strand nick

Wherein (3) comprises the coding sequence for the CD19-specific m194-1BBz CAR driven by the EF1a promoter (Smith et al. Nat Nanotechnol 12(8):813-820 (2017)). The Gene Writer in this example is guided to the murine Rosa26 locus using a gRNA, e.g., ACTCCAGTCTTTCTAGAAGA (SEQ ID NO: 1695), (Chu et al. Nat Biotechnol 33(5):543-548 (2015)). Production of RNA molecules is as according to examples provided herein, e.g., by in vitro transcription (e.g., Gene Writer polypeptide mRNA, template RNA) and by chemical synthesis (e.g., gRNA). Modifications to the RNA components of the system are as described elsewhere. For Gene Writer mRNA, the sequence additionally comprises a 5′ UTR (e.g., GGGAAAUAAGAGAGAAAAGAAGAGUAAGAAGAAAUAUAAGAGCCACC(SEQ ID NO: 1604)) and a 3′ UTR (e.g., UGAUAAUAGGCUGGAGCCUCGGUGGCCAUGCUUCUUGCCCCUUGGGCCUCCCCCC AGCCCCUCCUCCCCUUCCUGCACCCGUACCCCCGUGGUCUUUGAAUAAAGUCUGA(SEQ ID NO: 1605)) flanking the coding sequence. This combination of 5′ UTR and 3′ UTR has been shown to result in good expression of an operably linked ORF (Richner et al. Cell 168(6): P1114-1125 (2017)).

[0822] In order to achieve delivery specifically to T-cells, targeted LNPs (tLNPs) are generated that carry a conjugated mAb against CD4. See, e.g., Ramishetti et al. ACS Nano 9(7):6706-6716 (2015). Alternatively, conjugating a mAb against CD3 can be used to target both CD4⁺ and CD8⁺ T-cells (Smith et al. Nat Nanotechnol 12(8):813-820 (2017)). In other embodiments, the nanoparticle used to deliver to T-cells in vivo is a constrained nanoparticle that lacks a targeting ligand, as taught by Lokugamage et al. Adv Mater 31(41):e1902251 (2019).

[0823] The tLNP can be made by first preparing the nucleic acid mix (e.g., polypeptide mRNA:gRNA:template RNA molar ratio of 1:40:40) with a mixture of lipids (cholesterol, DSPC, PEG-DMG, Dlin-MC3-DMA, and DSPE-PEG-maleimide) and then chemically conjugating the desired DTT-reduced mAb (e.g., anti-CD4, e.g., clone YTS.177) to the maleimide functional group on the LNPs. See Ramishetti et al. ACS Nano 9(7):6706-6716 (2015).

[0824] Six to 8 week old C57BL6/J mice are injected intravenously with formulated LNP at a dose of 1 mg RNA/kg body weight. Blood is collected at one day and three days post-administration in heparin-coated collection tubes, and the leukocytes are isolated by density centrifugation using Ficoll-Paque PLUS (GE Healthcare). Five days post-administration, animals are euthanized and blood and organs (spleen, lymph nodes, bone marrow cells) are harvested for T-cell analysis. Expression of the anti-CD19 CAR is detected by FACS using specific immunological sorting. Positive cells are confirmed for integration by ddPCR on the sorted population, where primers are used that flank an integration junction, e.g., one primer of the pair annealing to the integrated cargo and the other to genomic DNA from the Rosa26 target site.

### Example 30: Mutation of DNA Binding Motifs of a Retrotransposase Prevents Integration at its Native Site

[0825] In this example, the intrinsic DNA binding properties of the DNA binding domain of a retrotransposon-based Gene Writer polypeptide are analyzed by mutagenesis or truncation of the region. The generation of these mutants and detection of reduced activity are useful for understanding the determinants of DNA targeting, as well as for creating mutant derivatives that have reduced or eliminated function that can then be used as scaffolds for fusions enabled by heterologous DNA binding domains. Here, it is shown that mutations in the C-terminal zinc finger domains, as well as the c-myb domain, have a profound impact on enzyme activity of the R2Tg retrotransposase at its native recognition sequence.

[0826] To test whether R2Tg DNA binding mutants resulted in abrogated DNA binding activity, exemplary mutants were constructed and assessed for integration activity at the native rDNA target site as a downstream readout of target DNA binding activity. In this example, the parental and mutated (*) domains were named and designed as follows:

| | ZF1: |
|---|---|
| (SEQ ID NO: 2012) | |
| | CPCCGTRVNSVLNLIEHLKVSH |
| | ZF1*: |
| (SEQ ID NO: 2013) | |
| | SPSSGTRVNSVLNLIEHLKVSH |
| | ZF2: |
| (SEQ ID NO: 2014) | |
| | CEVCNRDFTTKIGLGQHKRLAH |
| | ZF2*: |
| (SEQ ID NO: 2015) | |
| | SEVSNRDFTTKIGLGQHKRLAH |
| | c-myb: |
| (SEQ ID NO: 2016) | |
| | RCWTKEEEELLIRLEAQFEGNKNINKLIAEHITTKTAKQISD |
| | c-myb*: |
| (SEQ ID NO: 2017) | |
| | ACATKEEEELLIRLEAQFEGNKNINKLIAEHITTKTAKQISD |

The general structure of these domains is indicated in FIG. 30 A. Here, the mutant Gene Writer polypeptides were encoded within the Gene Writer template, meaning the polypeptide coding sequence was further flanked by the R2Tg-derived 5′ UTR and 3′ UTR and 100 nt of homology to the native target site, as described in the invention.

[0827] To test if mutations in the R2Tg DNA binding domains impacted R2Tg Gene Writer function, 250 ng of plasmid comprising the parental R2Tg polypeptide, an endonuclease-inactivated mutant (negative control for Gene Writer activity), each single DBD mutation, or all three DBD mutations was nucleofected into HEK293T cells using the Lonza Amaxa Nucleofector 96 Well Shuttle System with program DS150, as according to manufacturer's protocols. After nucleofection, cells were grown at 37° C., 5% CO₂ for 3 days prior to cell lysis and genomic DNA extraction. The extracted gDNA was measured for Gene Writer Template integration at the native rDNA site by ddPCR. Here, it was observed that mutations in the ZF1, ZF2, or c-myb domains inhibited integration, with the magnitude of effect being ZF2>c-myb>ZF1 (FIG. 30B).

### Example 31: Determination of Cleavage Site of Endonuclease Domain of Gene Writer by Indel Signature

[0828] This example describes a cell-based assay for determining the site of cleavage activity of a Gene Writer polypeptide comprising an endonuclease (EN) domain on a genomic DNA target. Specifically, it is shown that the activity of a retrotransposase can produce a low level of target site modification likely resulting from host DNA repair of target nicks. By using an extremely sensitive and targeted amplicon sequencing assay, this signature can be assessed to localize the site of cleavage. The ability to quickly assess an early step in relevant Gene Writing systems is an enabling assay for understanding and engineering the DNA specificity of the enzyme, e.g., sequence-specific DNA binding or sequence-specific endonuclease activity, without depending on complete integration, which may be affected by other properties of the system. In order to generate a cleavage site profile, an assay was created to analyze genomic sequence modifications at the predicted cleavage site of the retrotransposase R2Tg. A schematic of the target sequence of R2Tg depicting predicted DNA binding regions and the expected site of endonuclease cleavage is shown in FIG. 31 A. To determine whether R2Tg endonuclease activity can be detected around the predicted target site, 73 ng of an R2Tg expression plasmid were nucleofected into 200,000 U2OS cells using program DN100 and buffer SE of the Amaxa Lonza nucleofector, as according to manufacturer's instructions. Cells were cultured in DMEM with 10% FBS for three days post nucleofection before extraction of genomic DNA. Amplicons were generated using primers flanking the rDNA target site (5′-ACACTCTTTCCCTACACGACGCTCTTCCGATCTaggggaatccgactgtttaatta-3′ (SEQ ID NO: 2018) and 5′-GTGACTGGAGTTCAGACGTGTGCTCTTCCGATCTcacctctcatgtctcttcaccg-3′ (SEQ ID NO: 2019). Amplicon sequencing was performed using an Illumina MiSeq and results were analyzed using the CRISPResso2 pipeline (Clement et al Nat Biotechnol 37(3):224-226 (2019)) to determine mutational signatures in the target site. Insertions and deletions were found at and surrounding the predicted GG cleavage site, with the peak of the insertion signature occurring directly at the predicted R2Tg cleavage site (FIG. 31 B). These data validated the use of the indel signature assay for the detection and localization of endonuclease activity in a Gene Writing system.

### Example 32: Refining the Sequence Specificity of a Retrotransposase Endonuclease Domain

[0829] This example describes an experiment for elucidating the sequence specificity of endonuclease activity associated with a Gene Writer system. Specifically, DNA target sequence information important for endonuclease activity is elucidated through the targeted mutagenesis of regions of various sizes at or surrounding a site of cleavage. Here, the sequence specificity of the native endonuclease domain of the R2Tg retrotransposase is profiled by applying an indel signature assay (see Example 31) on cells comprising genomic landing pads with native or altered R2Tg target sequence to determine the cleavage activity of this library of targets.

[0830] In this example, cell lines were generated with stable integrations of landing pads comprising rDNA-derived sequence corresponding to the native target site where R2 class retrotransposons systems facilitate retrotransposition. These landing pads were designed to have either (1) a wild-type target sequence comprising rDNA-derived sequence from the R2 region of the rDNA; (2) the landing pad from (1) with 12-bp of sequence mutation at and around the R2 cleavage site; or (3) a series of mutations within the 12-bp sequence from (2) to further define the minimal sequence requirements within the 12 bp context described in Example 2. A complete list of landing pads can be found in Table LandingPads and is shown in FIG. 32 B. To create these cells lines, the DNA for different landing pads was synthesized and cloned into a lentiviral gene expression vector downstream of a GFP reporter (FIG. 32 A). Landing pad lentiviral vectors were verified by Sanger sequencing of the landing pad. To produce lentiviral particles for transduction, 9 μg of the sequence verified plasmids and 9 μg of lentiviral packaging mix (Biosettia) were transfected into the lentivirus packaging cell line LentiX-293T (Takara Bio). Transfected cells were incubated at 37° C., 5% CO2 for 48 hours (including one medium change at 24 hrs) and viral particle-containing medium was collected. The collected medium was filtered through a 0.2 μm filter to remove cell debris and prepared for transduction of U2OS cells. Virus-containing filtrate was diluted in DMEM and mixed with polybrene to prepare a dilution series for cell transduction, with a final concentration of 8 μg/mL polybrene. Recipient U2OS cells were grown in virus-containing medium for 48 hour and then split with fresh medium and grown to confluence. Transduction efficiency of the different dilutions of virus was measured by GFP expression via flow cytometry and ddPCR to determine average copy number of integrated lentiviral landing pads.

[0831] The ability of the R2Tg retrotransposase to exhibit endonuclease activity towards a target site with various mutations in and around the R2 cleavage position was assayed using indel profiling (Example 31). Specifically, 73 ng of a Gene Writer polypeptide expression vector comprising the R2Tg retrotransposase were nucleofected into the different U2OS landing pad cell lines using the Lonza Amaxa Nucleofector 96 Well Shuttle System with nucleofection program DN100, as according to manufacturer's instructions. Following nucleofection, cells were grown at 37° C., 5% CO2 for 3 days prior to cell lysis and genomic DNA extraction. Primers specific to the landing pad sequences (5′-ACACTCTTTCCCTACACGACGCTCTTCCGATCTgctcacacaggaaacagctatg-3′ (SEQ ID NO: 2020) and 5′-GTGACTGGAGTTCAGACGTGTGCTCTTCCGATCTggatgtgctgcaaggcgatt-3′ (SEQ ID NO: 2021) were used to amplify the region and purified amplicons were sequenced on an Illumina MiSeq. Signatures of endonuclease activity at the target site were analyzed by detection of insertions and deletions at the landing pad using the CRISPResso2 pipeline (Clement et al Nat Biotechnol 37(3):224-226 (2019)). As was shown in Example 31, R2Tg endonuclease activity occurs at a GG cleavage site (FIGS. 31 A and B). Using this series of landing pads, the minimum sequence important for endonuclease activity for the tested polypeptide was found to include this GG dinucleotide and an additional AA dinucleotide located immediately upstream, defining a 5′-AAGG-3′ motif important for endonuclease activity within the native target sequence (FIG. 32 B). In some embodiments, it may be desirable to find a native endonuclease-specific motif at a site in the human genome for retargeting a retrotransposase-based Gene Writer system. In some embodiments, a naturally occurring AAGG sequence in the genome is used as a seed for retargeting an R2 retrotransposase-based Gene Writing system, wherein the DNA binding domain is mutated or replaced with a heterologous DNA binding domain such that the binding of the Gene Writer polypeptide to the new target site results in the proper positioning of the endonuclease domain to the AAGG motif to enable endonuclease activity.

[0832] Table 41: Landing pads comprising wild-type or mutated target sequences, as described in Example 32. Sequences were incorporated into the genome using a lentiviral vector system for stable integration. Sequences in the table are provided in 5′ to 3′ orientation, where underlined text indicates native rDNA sequence and bold text indicates mutations from the native rDNA sequence.

TABLE 41
Landing pads comprising wild-type or
mutated target sequences

| Landing | | SEQ |
|---|---|---|
| Pad | Corresponding Target Sequence | ID NO. |
| WT | GCTCACACAGGAAACAGCTATGACCATGATTACGCCAAGCTG | 1986 |
| | TTGACGCGATGTGATTTCTGCCCAGTGCTCTGAATGTCAAAG | |
| | TGAAGAAATTCAATGAAGCGCGGGTAAACGGCGGGAGTAACT | |
| | ATGACTCTCTTAAGGTAGCCAAATGCCTCGTCATCTAATTAG | |
| | TGACGCGCATGAATGGATGAACGAGATTCCCACTGTCCCTAC | |
| | CTACTATCCAGCGAAACCACAGCCAAGGGAAATTCACTGGCC | |
| | GTCGTTTTACAACGTCGTGACTGGGAAAACCCTGGCGTTACC | |
| | CAACTTAATCGCCTTGCAGCACATCC | |
| 12-bp | GCTCACACAGGAAACAGCTATGACCATGATTACGCCAAGCTG | 1987 |
| Mutant | TTGACGCGATGTGATTTCTGCCCAGTGCTCTGAATGTCAAAG | |
| | TGAAGAAATTCAATGAAGCGCGGGTAAACGGCGGGAGTAACT | |
| | ATGACTCTCTTTCCAATATGATTTGCCTCGTCATCTAATTAG | |
| | TGACGCGCATGAATGGATGAACGAGATTCCCACTGTCCCTAC | |
| | CTACTATCCAGCGAAACCACAGCCAAGGGAAATTCACTGGCC | |
| | GTCGTTTTACAACGTCGTGACTGGGAAAACCCTGGCGTTACC | |
| | CAACTTAATCGCCTTGCAGCACATCC | |
| 10-bp (−) | GCTCACACAGGAAACAGCTATGACCATGATTACGCCAAGCTG | 1988 |
| | TTGACGCGATGTGATTTCTGCCCAGTGCTCTGAATGTCAAAG | |
| | TGAAGAAATTCAATGAAGCGCGGGTAAACGGCGGGAGTAACT | |
| | ATGACTCTCTTTCCAATATGAAATGCCTCGTCATCTAATTAG | |
| | TGACGCGCATGAATGGATGAACGAGATTCCCACTGTCCCTAC | |
| | CTACTATCCAGCGAAACCACAGCCAAGGGAAATTCACTGGCC | |
| | GTCGTTTTACAACGTCGTGACTGGGAAAACCCTGGCGTTACC | |
| | CAACTTAATCGCCTTGCAGCACATCC | |
| 6-bp (−) | GCTCACACAGGAAACAGCTATGACCATGATTACGCCAAGCTG | 1989 |
| | TTGACGCGATGTGATTTCTGCCCAGTGCTCTGAATGTCAAAG | |
| | TGAAGAAATTCAATGAAGCGCGGGTAAACGGCGGGAGTAACT | |
| | ATGACTCTCTTTCCAATGCCAAATGCCTCGTCATCTAATTAG | |
| | TGACGCGCATGAATGGATGAACGAGATTCCCACTGTCCCTAC | |
| | CTACTATCCAGCGAAACCACAGCCAAGGGAAATTCACTGGCC | |
| | GTCGTTTTACAACGTCGTGACTGGGAAAACCCTGGCGTTACC | |
| | CAACTTAATCGCCTTGCAGCACATCC | |
| 4-bp (−) | GCTCACACAGGAAACAGCTATGACCATGATTACGCCAAGCTG | 1990 |
| | TTGACGCGATGTGATTTCTGCCCAGTGCTCTGAATGTCAAAG | |
| | TGAAGAAATTCAATGAAGCGCGGGTAAACGGCGGGAGTAACT | |
| | ATGACTCTCTTTCCATAGCCAAATGCCTCGTCATCTAATTAG | |
| | TGACGCGCATGAATGGATGAACGAGATTCCCACTGTCCCTAC | |
| | CTACTATCCAGCGAAACCACAGCCAAGGGAAATTCACTGGCC | |
| | GTCGTTTTACAACGTCGTGACTGGGAAAACCCTGGCGTTACC | |
| | CAACTTAATCGCCTTGCAGCACATCC | |
| 2-bp (−) | GCTCACACAGGAAACAGCTATGACCATGATTACGCCAAGCTG | 1991 |
| | TTGACGCGATGTGATTTCTGCCCAGTGCTCTGAATGTCAAAG | |
| | TGAAGAAATTCAATGAAGCGCGGGTAAACGGCGGGAGTAACT | |
| | ATGACTCTCTTTCGGTAGCCAAATGCCTCGTCATCTAATTAG | |
| | TGACGCGCATGAATGGATGAACGAGATTCCCACTGTCCCTAC | |
| | CTACTATCCAGCGAAACCACAGCCAAGGGAAATTCACTGGCC | |
| | GTCGTTTTACAACGTCGTGACTGGGAAAACCCTGGCGTTACC | |
| | CAACTTAATCGCCTTGCAGCACATCC | |
| 12-bp | GCTCACACAGGAAACAGCTATGACCATGATTACGCCAAGCTG | 1992 |
| (GG) | TTGACGCGATGTGATTTCTGCCCAGTGCTCTGAATGTCAAAG | |
| | TGAAGAAATTCAATGAAGCGCGGGTAAACGGCGGGAGTAACT | |
| | ATGACTCTCTTTCGGATATGATTTGCCTCGTCATCTAATTAG | |
| | TGACGCGCATGAATGGATGAACGAGATTCCCACTGTCCCTAC | |
| | CTACTATCCAGCGAAACCACAGCCAAGGGAAATTCACTGGCC | |
| | GTCGTTTTACAACGTCGTGACTGGGAAAACCCTGGCGTTACC | |
| | CAACTTAATCGCCTTGCAGCACATCC | |
| 10-bp | GCTCACACAGGAAACAGCTATGACCATGATTACGCCAAGCTG | 1993 |
| (GG-) | TTGACGCGATGTGATTTCTGCCCAGTGCTCTGAATGTCAAAG | |
| | TGAAGAAATTCAATGAAGCGCGGGTAAACGGCGGGAGTAACT | |
| | ATGACTCTCTTTCGGATATGAAATGCCTCGTCATCTAATTAG | |
| | TGACGCGCATGAATGGATGAACGAGATTCCCACTGTCCCTAC | |
| | CTACTATCCAGCGAAACCACAGCCAAGGGAAATTCACTGGCC | |
| | GTCGTTTTACAACGTCGTGACTGGGAAAACCCTGGCGTTACC | |
| | CAACTTAATCGCCTTGCAGCACATCC | |
| 8-bp | GCTCACACAGGAAACAGCTATGACCATGATTACGCCAAGCTG | 1994 |
| (GG-) | TTGACGCGATGTGATTTCTGCCCAGTGCTCTGAATGTCAAAG | |
| | TGAAGAAATTCAATGAAGCGCGGGTAAACGGCGGGAGTAACT | |
| | ATGACTCTCTTTCGGATATCAAATGCCTCGTCATCTAATTAG | |
| | TGACGCGCATGAATGGATGAACGAGATTCCCACTGTCCCTAC | |
| | CTACTATCCAGCGAAACCACAGCCAAGGGAAATTCACTGGCC | |
| | GTCGTTTTACAACGTCGTGACTGGGAAAACCCTGGCGTTACC | |
| | CAACTTAATCGCCTTGCAGCACATCC | |
| 6-bp | GCTCACACAGGAAACAGCTATGACCATGATTACGCCAAGCTG | 1995 |
| (GG-) | TTGACGCGATGTGATTTCTGCCCAGTGCTCTGAATGTCAAAG | |
| | TGAAGAAATTCAATGAAGCGCGGGTAAACGGCGGGAGTAACT | |
| | ATGACTCTCTTTCGGATGCCAAATGCCTCGTCATCTAATTAG | |
| | TGACGCGCATGAATGGATGAACGAGATTCCCACTGTCCCTAC | |
| | CTACTATCCAGCGAAACCACAGCCAAGGGAAATTCACTGGCC | |
| | GTCGTTTTACAACGTCGTGACTGGGAAAACCCTGGCGTTACC | |
| | CAACTTAATCGCCTTGCAGCACATCC | |
| 12-bp | GCTCACACAGGAAACAGCTATGACCATGATTACGCCAAGCTG | 1996 |
| (AGGT-) | TTGACGCGATGTGATTTCTGCCCAGTGCTCTGAATGTCAAAG | |
| | TGAAGAAATTCAATGAAGCGCGGGTAAACGGCGGGAGTAACT | |
| | ATGACTCTCTTTAGGTTATGATTTGCCTCGTCATCTAATTAG | |
| | TGACGCGCATGAATGGATGAACGAGATTCCCACTGTCCCTAC | |
| | CTACTATCCAGCGAAACCACAGCCAAGGGAAATTCACTGGCC | |
| | GTCGTTTTACAACGTCGTGACTGGGAAAACCCTGGCGTTACC | |
| | CAACTTAATCGCCTTGCAGCACATCC | |
| 10-bp | GCTCACACAGGAAACAGCTATGACCATGATTACGCCAAGCTG | 1997 |
| (AGGT-) | TTGACGCGATGTGATTTCTGCCCAGTGCTCTGAATGTCAAAG | |
| | TGAAGAAATTCAATGAAGCGCGGGTAAACGGCGGGAGTAACT | |
| | ATGACTCTCTTTAGGTTATGAAATGCCTCGTCATCTAATTAG | |
| | TGACGCGCATGAATGGATGAACGAGATTCCCACTGTCCCTAC | |
| | CTACTATCCAGCGAAACCACAGCCAAGGGAAATTCACTGGCC | |
| | GTCGTTTTACAACGTCGTGACTGGGAAAACCCTGGCGTTACC | |
| | CAACTTAATCGCCTTGCAGCACATCC | |
| 8-bp | GCTCACACAGGAAACAGCTATGACCATGATTACGCCAAGCTG | 1998 |
| (AGGT-) | TTGACGCGATGTGATTTCTGCCCAGTGCTCTGAATGTCAAAG | |
| | TGAAGAAATTCAATGAAGCGCGGGTAAACGGCGGGAGTAACT | |
| | ATGACTCTCTTTAGGTTATCAAATGCCTCGTCATCTAATTAG | |
| | TGACGCGCATGAATGGATGAACGAGATTCCCACTGTCCCTAC | |
| | CTACTATCCAGCGAAACCACAGCCAAGGGAAATTCACTGGCC | |
| | GTCGTTTTACAACGTCGTGACTGGGAAAACCCTGGCGTTACC | |
| | CAACTTAATCGCCTTGCAGCACATCC | |
| 10-bp (+) | GCTCACACAGGAAACAGCTATGACCATGATTACGCCAAGCTG | 1999 |
| | TTGACGCGATGTGATTTCTGCCCAGTGCTCTGAATGTCAAAG | |
| | TGAAGAAATTCAATGAAGCGCGGGTAAACGGCGGGAGTAACT | |
| | ATGACTCTCTTAACAATATGATTTGCCTCGTCATCTAATTAG | |
| | TGACGCGCATGAATGGATGAACGAGATTCCCACTGTCCCTAC | |
| | CTACTATCCAGCGAAACCACAGCCAAGGGAAATTCACTGGCC | |
| | GTCGTTTTACAACGTCGTGACTGGGAAAACCCTGGCGTTACC | |
| | CAACTTAATCGCCTTGCAGCACATCC | |
| 8-bp (+) | GCTCACACAGGAAACAGCTATGACCATGATTACGCCAAGCTG | 2000 |
| | TTGACGCGATGTGATTTCTGCCCAGTGCTCTGAATGTCAAAG | |
| | TGAAGAAATTCAATGAAGCGCGGGTAAACGGCGGGAGTAACT | |
| | ATGACTCTCTTAAGGATATGATTTGCCTCGTCATCTAATTAG | |
| | TGACGCGCATGAATGGATGAACGAGATTCCCACTGTCCCTAC | |
| | CTACTATCCAGCGAAACCACAGCCAAGGGAAATTCACTGGCC | |
| | GTCGTTTTACAACGTCGTGACTGGGAAAACCCTGGCGTTACC | |
| | CAACTTAATCGCCTTGCAGCACATCC | |
| 6-bp (+) | GCTCACACAGGAAACAGCTATGACCATGATTACGCCAAGCTG | 2001 |
| | TTGACGCGATGTGATTTCTGCCCAGTGCTCTGAATGTCAAAG | |
| | TGAAGAAATTCAATGAAGCGCGGGTAAACGGCGGGAGTAACT | |
| | ATGACTCTCTTAAGGTAATGATTTGCCTCGTCATCTAATTAG | |
| | TGACGCGCATGAATGGATGAACGAGATTCCCACTGTCCCTAC | |
| | CTACTATCCAGCGAAACCACAGCCAAGGGAAATTCACTGGCC | |
| | GTCGTTTTACAACGTCGTGACTGGGAAAACCCTGGCGTTACC | |
| | CAACTTAATCGCCTTGCAGCACATCC | |
| 2-bp (+) | GCTCACACAGGAAACAGCTATGACCATGATTACGCCAAGCTG | 2002 |
| | TTGACGCGATGTGATTTCTGCCCAGTGCTCTGAATGTCAAAG | |
| | TGAAGAAATTCAATGAAGCGCGGGTAAACGGCGGGAGTAACT | |
| | ATGACTCTCTTAAGGTAGCCATTTGCCTCGTCATCTAATTAG | |
| | TGACGCGCATGAATGGATGAACGAGATTCCCACTGTCCCTAC | |
| | CTACTATCCAGCGAAACCACAGCCAAGGGAAATTCACTGGCC | |
| | GTCGTTTTACAACGTCGTGACTGGGAAAACCCTGGCGTTACC | |
| | CAACTTAATCGCCTTGCAGCACATCC | |

### Example 33: Determination of Sequence Specificity for Retargeting Gene Writer Polypeptides

[0833] This example describes the redirecting of the polypeptide component of a Gene Writer system from its native recognition sequence to a new location in the human genome. As described in this disclosure, a retrotransposase-based system can be directed to recognize a new DNA sequence through the addition of a heterologous DNA binding domain alone or in tandem with mutagenesis of an endogenous DNA-binding domain. Here, a zinc finger capable of targeting the native human AAVS1 site is fused to a Gene Writer polypeptide in order to confer recognition of the AAVS1 sequence.

[0834] In order to direct a Gene Writer polypeptide comprising the R2Tg retrotransposase to a DNA sequence different from its native rDNA target sequence, a zinc finger (ZF) domain targeting the human AAVS1 site was fused to the N-terminus of the polypeptide. Using an approach similar to Example 32, cells were generated comprising various compositions of genomic landing pads, representing different combinations of the AAVS1 sequence recognized by the ZF and the native rDNA target sequence recognized by R2 retrotransposases. In total, the library consisted of 460 distinct landing pads containing the AAVS1 sequence along with different lengths of the rDNA sequence, further diversified by varying the distance and orientation between the two sequences (FIG. 33). In this example, all landing pads were designed to include a human AAVS1 genomic sequence comprising the AAVS1 ZF binding site. Additionally, rDNA sequence containing the minimum AAGG sequence important for R2Tg endonuclease activity (see Example 32) was added to the AAVS1 sequence according to the following parameters: (1) the rDNA sequence included the 12, 22, 32, 42, 52, 62, or 72 nt of rDNA sequence located immediately 3′ of the AAGG tetranucleotide; or (2) the rDNA sequence included the 12, 22, 32, or 42 nt immediately 3′ and 5′ of the AAGG cleavage site, resulting in total rDNA lengths of 24, 44, 64, or 84 nt. The different rDNA sequence compositions were further placed at various distances from the AAVS1 ZF binding site, including at a distance of 5, 10, 15, 20, 25, 30, 40, 45, 50, 55, 60, 65, 70, 75, 80, or 85 nt. Design considerations were included to hold the total length of the landing pad site between assay primers constant to prevent bias during PCR amplification, e.g., longer rDNA sequences could not be placed at the same distance from the AAVS1 site as shorter rDNA sequences. As a final variation, the orientation between the two sites was varied, such that the rDNA sequence compositions described above were placed either upstream or downstream of the AAVS1 site in either the forward or reverse orientations. Using these parameters, a library of 454 AAVS1-rDNA hybrid landing pads was designed, with controls including various combinations of full-length rDNA sequence and AAVS1 sequence (positive) or no rDNA sequence (negative). An illustrative representation of the landing pad design strategy is shown in FIG. 33 and a short list of exemplary landing pad sequences to demonstrate the specific compositions is provided in Table 42.

[0835] The lentiviral construct library described above was synthesized with 3′ barcodes for sequence analysis and cloned into a lentiviral gene expression vector. The lentiviral system was then used to generate U2OS cell lines with integrated landing pads, as described in Example 32. To validate successful library generation, the U2OS landing pad cell line pool was analyzed for landing pad representation. Primers specific to conserved landing pad sequences (see Example 32) were used to amplify across the target region, including a construct-specific barcode. Barcodes present in each landing pad were computationally demultiplexed and sorted, with approximately 94% of landing pads being represented by at least 10,000 reads (FIG. 34).

[0836] Following validation of the library, U2OS landing pad cells were used to determine the minimum sequence deterinants for retargeting an R2Tg retrotransposase-based Gene Writer polypeptide. Two retargeting constructs were generated by fusion of the coding sequence of ZF-AAVS1 to either full-length R2Tg (SEQ ID NO: 1672) (ZF-R2Tg, FIG. 35 A) or to a DNA-binding domain truncated R2Tg SEQ ID NO: 1663) (ZF-R2Tg(noDBD), FIG. 36 A) and the corresponding expression plasmids were electroporated into U2OS pooled landing pad cells. Specifically, 400 ng of either ZF-R2Tg or ZF-R2Tg(noDBD) were delivered to cells using the Lonza Amaxa Nucleofector 96 Well Shuttle System with nucleofection program DN100, as according to manufacturer's instructions. Following nucleofection, cells were grown at 37° C., 5% CO₂ for 3 days prior to cell lysis and genomic DNA extraction. As with the library validation above, primers specific to the landing pad sequences were used to amplify the target region for amplicon sequencing with an Illumina MiSeq. Sequencing reads to landing pad variants were first de-multiplexed using the associated barcodes, then signatures of endonuclease activity at the target site were analyzed by detection of insertions and deletions using the CRISPResso2 pipeline (Clement et al Nat Biotechnol 37(3):224-226 (2019)).

[0837] Given the ZF-R2Tg construct comprises a full-length R2Tg protein, it was predicted that this polypeptide would still retain the ability to recognize its native target sequence. Insertion frequencies at the GG target site were computed and plotted for each landing pad (FIG. 35 A). Positive control landing pads containing 200 nt of rDNA sequence were found to contain insertion signatures at the GG cleavage site, as in Example 31. The negative control landing pad, devoid of rDNA sequence, was not found to harbor any insertions. Here, insertion signatures resulting from ZF-R2Tg endonuclease activity at the target cleavage site were detected in landing pads containing 44, 64, and 84 nt of the native rDNA target sequence, but not in those containing only 24 nt of the native rDNA target sequence (FIGS. 35 A and B). These rDNA sequence lengths that tested positive were shown to be positive across landing pads with different distances from the AAVS1 sequence.

[0838] Next, the ZF-R2Tg(noDBD) construct, lacking its endogenous DNA binding domain and predicted to depend on the ZF for target binding and activity, was similarly assessed. Insertion frequencies at the GG target site were computed and plotted for each landing pad (FIG. 36 A). The negative control landing pad, devoid of rDNA sequence, was not found to harbor any insertions. Given the R2Tg protein in this construct comprised a significant deletion, there was no positive control landing pad configuration for verifying activity. In this experiment, two different landing pad configurations showed indel signatures at the GG target site. Both hits comprised the same 44 nt of rDNA sequence, but were differentially positioned relative to the AAVS1 site, where one had the rDNA target at a distance of 55 nt upstream of the AAVS1 site and the other was at a distance of 20 nt downstream of the AAVS1 site and in the reverse complement orientation (FIGS. 36 A and B). Despite having different compositions, these two hits indicated the restoration of activity of an R2 retrotransposase DNA binding domain mutant by compensating for the deleted endogenous domain with a heterologous DNA binding domain fusion known to target a native locus in the human genome. Additionally, this Example establishes a method for further refinement of the requirements for retargeting a Gene Writer polypeptide to an alternate sequence in the human genome.

[0839] Table 42 provides a selection of exemplary landing pad target sequences designed to test Gene Writer polypeptides comprising AAVS1 zinc finger fusions to the R2Tg retrotransposase is shown here, e.g., in this Example. Included are 1) a positive control comprising the AAVS1 zinc finger recognition sequence and a full 200 nt region from the rDNA centered around the R2 cleavage site; 2) a negative control lacking rDNA sequence; 3) a 44 nt rDNA sequence located upstream of the AAVS1 sequence; and 4) a 44 nt rDNA sequence located downstream of the AAVS1 sequence and in the reverse orientation. The two experimental landing pads included here were shown to enable cleavage of the AAGG core sequence using a zinc finger fused to a mutant R2Tg lacking its endogenous N-terminal DNA binding domain, e.g., see this Example. Ribsomal DNA sequence is indicated by underlined text, the AAGG core is indicated by brackets, and the binding sequence of the AAVS1 zinc finger is indicated by lowercase text.

TABLE 42
selection of exemplary landing pad target sequences
designed to test Gene Writer polypeptides comprising
AAVS1 zinc finger fusions to the R2Tg retrotransposase

| | | SEQ |
|---|---|---|
| Description | Sequence | ID NO |
| Positive Control | GCTCACACAGGAAACAGCTATGACCATGATTACGCC | 2003 |
| R2(200)_left(frw) | GTTGACGCGATGTGATTTCTGCCCAGTGCTCTGAAT | |
| | GTCAAAGTGAAGAAATTCAATGAAGCGCGGGTAAAC | |
| | GGCGGGAGTAACTATGACTCTCTT[AAGG]TAGCCA | |
| | AATGCCTCGTCATCTAATTAGTGACGCGCATGAATG | |
| | GATGAACGAGATTCCCACTGTCCCTACCTACTATCC | |
| | AGCGAAACCACAGCCAAGGGAAGAGTGGCCccactg | |
| | tggggtGGAGGGGACGACTGGGAAAAGTTAGGATCC | |
| | CCTGGCGTTACCCAACTTAATCGCCTTGCAGCACAT | |
| | CC | |
| Negative Control | GCTCACACAGGAAACAGCTATGACCATGATTACGCC | 2004 |
| AAVS1_noR2 | AAGCTTCTGCCTAACAGGAGGTGGGGGTTAGACCCA | |
| | ATATCAGGAGACTAGGAAGGAGGAGGCCTAAGGATG | |
| | GGGCTTTTCTGTCACCAATCCTGTCCCTAGTGGCCc | |
| | cactgtggggtGGAGGGGACAGATAAAAGTACCCAG | |
| | AACCAGAGCCACATTAACCGGCCCTGGGAATATAAG | |
| | GTGGTCCCAGCTCGGGGACACAGGATCCCTGGAGGC | |
| | AGCAAACATGCTGACTGGGAAAATCTGGCTTCCCCT | |
| | GGCGTTACCCAACTTAATCGCCTTGCAGCACATCC | |
| AAVS1_R2(44nts) | GCTCACACAGGAAACAGCTATGACCATGATTACGCC | 2005 |
| at −55(frw) | AAGCTTCGGGAGTAACTATGACTCTCTT[AAGG]TA | |
| | GCCAAATGCCTCGTCAGGAAGGAGGAGGCCTAAGGA | |
| | TGGGGCTTTTCTGTCACCAATCCTGTCCCTAGTGGC | |
| | CccactgtggggtGGAGGGGACAGATAAAAGTACCC | |
| | AGAACCAGAGCCACATTAACCGGCCCTGGGAATATA | |
| | AGGTGGTCCCAGCTCGGGGACACAGGATCCCTGGAG | |
| | GCAGCAAACATGCTGACTGGGAAAACTTAGAGAACC | |
| | CTGGCGTTACCCAACTTAATCGCCTTGCAGCACATC | |
| | C | |
| AAVS1_R2(44nts) | GCTCACACAGGAAACAGCTATGACCATGATTACGCC | 2006 |
| at +20(rc) | AAGCTTCTGCCTAACAGGAGGTGGGGGTTAGACCCA | |
| | ATATCAGGAGACTAGGAAGGAGGAGGCCTAAGGATG | |
| | GGGCTTTTCTGTCACCAATCCTGTCCCTAGTGGCCc | |
| | cactgtggggtGGAGGGGACAGATAAAAGTACCCAG | |
| | AACCTGACGAGGCATTTGGCTA[CCTT]AAGAGAGT | |
| | CATAGTTACTCCCGCGGGGACACAGGATCCCTGGAG | |
| | GCAGCAAACATGCTGACTGGGAAAACCTTCTCGGCC | |
| | CTGGCGTTACCCAACTTAATCGCCTTGCAGCACATC | |
| | C | |

### Example 34: Selection of Lipid Reagents with Reduced Aldehyde Content

[0840] In this example, lipids are selected for downstream use in lipid nanoparticle formulations containing Gene Writing component nucleic acid(s), and lipids are selected based at least in part on having an absence or low level of contaminating aldehydes. Reactive aldehyde groups in lipid reagents may cause chemical modifications to component nucleic acid(s), e.g., RNA, e.g., template RNA, during LNP formulation. Thus, in some embodiments, the aldehyde content of lipid reagents is minimized.

Liquid chromatography (LC) coupled with tandem mass spectrometry (MS/MS) can be used to separate, characterize, and quantify the aldehyde content of reagents, e.g., as described in Zurek et al. The Analyst 124(9):1291-1295 (1999), incorporated herein by reference. Here, each lipid reagent is subjected to LC-MS/MS analysis. The LC/MS-MS method first separates the lipid and one or more impurities with a C8 IPLC column and follows with the detection and structural determination of these molecules with the mass spectrometer. If an aldehyde is present in a lipid reagent, it is quantified using a staple-isotope labeled (SIL) standard that is structurally identical to the aldehyde, but is heavier due to C13 and N15 labeling. An appropriate amount of the SIL standard is spiked into the lipid reagent. The mixture is then subjected to LC-MS/MS analysis. The amount of contaminating aldehyde is determined by multiplying the amount of SIL standard and the peak ratio (unknown/SIL). Any identified aldehyde(s) in the lipid reagents is quantified as described. In some embodiments, lipid raw materials selected for LNP formulation are not found to contain any contaminating aldehyde content above a chosen level. In some embodiments, one or more, and optionally all, lipid reagents used for formulation comprise less than 3% total aldehyde content. In some embodiments, one or more, and optionally all, lipid reagents used for formulation comprise less than 0.3% of any single aldehyde species. In some embodiments, one or more, and optionally all, lipid reagents used in formulation comprise less than 0.3% of any single aldehyde species and less than 3% total aldehyde content.

### Example 35: Quantification of RNA Modification Caused by Aldehydes During Formulation

[0841] In this example, the RNA molecules are analyzed post-formulation to determine the extent of any modifications that may have happened during the formulation process, e.g., to detect chemical modifications caused by aldehyde contamination of the lipid reagents (see, e.g., Example 34).

RNA modifications can be detected by analysis of ribonucleosides, e.g., as according to the methods of Su et al. Nature Protocols 9:828-841 (2014), incorporated herein by reference in its entirety. In this process, RNA is digested to a mix of nucleosides, and then subjected to LC-MS/MS analysis. RNA post-formulation is contained in LNPs and must first be separated from lipids by coprecipitating with GlycoBlue in 80% isopropanol. After centrifugation, the pellets containing RNA are carefully transferred to a new Eppendorf tube, to which a cocktail of enzymes (benzonase, Phosphodiesterase type 1, phosphatase) is added to digest the RNA into nucleosides. The Eppendorf tube is placed on a preheated Thermomixer at 37□ C. for 1 hour. The resulting nucleosides mix is directly analyzed by a LC-MS/MS method that first separates nucleosides and modified nucleosides with a C18 column and then detects them with mass spectrometry.
If aldehyde(s) in lipid reagents have caused chemical modification, data analysis will associate the modified nucleoside(s) with the aldehyde(s). A modified nucleoside can be quantified using a SIL standard which is structurally identical to the native nucleoside except heavier due to C13 and N15 labeling. An appropriate amount of the SIL standard is spiked into the nucleoside digest, which is then subjected to LC-MS/MS analysis. The amount of the modified nucleoside is obtained by multiplying the amount of SIL standard and the peak ratio (unknown/SIL). LC-MS/MS is capable of quantifying all the targeted molecules simultaneously.
In some embodiments, the use of lipid reagents with higher contaminating aldehyde content results in higher levels of RNA modification as compared to the use of higher purity lipid reagents as materials during the lipid nanoparticle formulation process. Thus, in preferred embodiments, higher purity lipid reagents are used that result in RNA modification below an acceptable level.

### Example 36: Gene Writer™ Enabling Large Insertion into Genomic DNA

[0842] This example describes the use of a Gene Writer™ gene editing system to alter a genomic sequence by insertion of a large string of nucleotides.

[0843] In this example, the Gene Writer™ polypeptide, gRNA, and writing template are provided as DNA transfected into HEK293T cells. The Gene Writer™ polypeptide uses a Cas9 nickase for both DNA-binding and endonuclease functions. The reverse transcriptase function is derived from the highly processive RT domain of an R2 retrotransposase. The writing template is designed to have homology to the target sequence, while incorporating the genetic payload at the desired position, such that reverse transcription of the template RNA results in the generation of a new DNA strand containing the desired insertion.

[0844] To create a large insertion in the human HEK293T cell DNA, the Gene Writer™ polypeptide is used in conjunction with a specific gRNA, which targets the Cas9-containing Gene Writer™ to the target locus, and a template RNA for reverse transcription, which contains an RT-binding motif (3′ UTR from an R2 element) for associating with the reverse transcriptase, a region of homology to the target site for priming reverse transcription, and a genetic payload (GFP expression unit). This complex nicks the target site and then performs TPRT on the template, initiating the reaction by using priming regions on the template that are complementary to the sequence immediately adjacent to the site of the nick and copying the GFP payload into the genomic DNA.

After transfection, cells are incubated for three days to allow for expression of the Gene Writing™ system and conversion of the genomic DNA target. After the incubation period, genomic DNA is extracted from cells. Genomic DNA is then subjected to PCR-based amplification using site-specific primers and amplicons are sequenced on an Illumina MiSeq according to manufacturer's protocols. Sequence analysis is then performed to determine the frequency of reads containing the desired edit.

### Example 37: Gene Writer™ Enabling Large Insertion into Genomic DNA

[0845] This example describes the use of a Gene Writer system in a human cell wherein the single-stranded template repair (SSTR) pathway is inhibited.

[0846] In this example, the SSTR pathway will be inhibited using siRNAs against the core components of the pathway: FANCA, FANCD2, FANCE, USP1. Control siRNAs of a non-target control will also be included. 200 k U2OS cells will be nucleofected with 30 pmols (1.5 μM) siRNAs, as well as R2Tg driver and transgene plasmids (trans configuration). Specifically, 250 ng of Plasmids expressing R2Tg, control R2Tg with a mutation in the RT domain, or control R2Tg with an endonuclease inactivating mutation) are used in conjunction with transgene at a 1:4 molar ratio (driver to transgene). Transfections of U2OS cells is performed in SE buffer using program DN100. After nucleofection, cells are grown in complete medium for 3 days. gDNA is harvested on day 3 and ddPCR is performed to assess integration at the rDNA site. Transgene integration at rDNA is detected in the absence of core SSTR pathway components.

### Example 38: Formulation of Lipid Nanoparticles Encapsulating Firefly Luciferase mRNA

[0847] In this example, a reporter mRNA encoding firefly luciferase was formulated into lipid nanoparticles comprising different ionizable lipids. Lipid nanoparticle (LNP) components (ionizable lipid, helper lipid, sterol, PEG) were dissolved in 100% ethanol with the lipid component. These were then prepared at molar ratios of 50:10:38.5:1.5 using ionizable lipid LIPIDV004 or LIPIDV005 (Table A1), DSPC, cholesterol, and DMG-PEG 2000, respectively. Firefly Luciferase mRNA-LNPs containing the ionizable lipid LIPIDV003 (Table A1) were prepared at a molar ratio of 45:9:44:2 using LIPIDV003, DSPC, cholesterol, and DMG-PEG 2000, respectively. Firefly luciferase mRNA used in these formulations was produced by in vitro transcription and encoded the Firefly Luciferase protein, further comprising a 5′ cap, 5′ and 3′ UTRs, and a polyA tail. The mRNA was synthesized under standard conditions for T7 RNA polymerase in vitro transcription with co-transcriptional capping, but with the nucleotide triphosphate UTP 100% substituted with Ni-methyl-pseudouridine triphosphate in the reaction. Purified mRNA was dissolved in 25 mM sodium citrate, pH 4 to a concentration of 0.1 mg/mL.

[0848] Firefly Luciferase mRNA was formulated into LNPs with a lipid amine to RNA phosphate (N:P) molar ratio of 6. The LNPs were formed by microfluidic mixing of the lipid and RNA solutions using a Precision Nanosystems NanoAssemblr™ Benchtop Instrument, using the manufacturer's recommended settings. A 3:1 ratio of aqueous to organic solvent was maintained during mixing using differential flow rates. After mixing, the LNPs were collected and dialyzed in 15 mM Tris, 5% sucrose buffer at 4° C. overnight. The Firefly Luciferase mRNA-LNP formulation was concentrated by centrifugation with Amicon 10 kDa centrifugal filters (Millipore). The resulting mixture was then filtered using a 0.2 μm sterile filter. The final LNP was stored at −80° C. until further use.

TABLE A1
Ionizable Lipids used in Example 37

| | | Molecular | |
|---|---|---|---|
| LIPID ID | Chemical Name | Weight | Structure |
| LIPIDV003 | (9Z,12Z)-3-((4,4- bis(octyloxy)butanoyl) oxy)-2-((((3-(diethylamino) propoxy)carbonyl)oxy) methyl)propyl octadeca-9,12- dienoate | 852.29 | [chemical structure] |
| LIPIDV004 | Heptadecan-9-yl 8-((2- hydroxyethyl)(8-(nonyloxy)-8- oxooctyl)amino)octanoate | 710.18 | [chemical structure] |
| LIPIDV005 | | 919.56 | [chemical structure] |

[chemical structure]

[0849] Prepared LNPs were analyzed for size, uniformity, and % RNA encapsulation. The size and uniformity measurements were performed by dynamic light scattering using a Malvern Zetasizer DLS instrument (Malvern Panalytical). LNPs were diluted in PBS prior to being measured by DLS to determine the average particle size (nanometers, nm) and polydispersity index (pdi). The particle sizes of the Firefly Luciferase mRNA-LNPs are shown in Table A2.

TABLE A2
LNP particle size and uniformity

| LNP ID | Ionizable Lipid | Particle Size (nm) | pdi |
|---|---|---|---|
| LNPV019-002 | LIPIDV005 | 77 | 0.04 |
| LNPV006-006 | LIPIDV004 | 71 | 0.08 |
| LNP V011-003 | LIPIDV003 | 87 | 0.08 |

[0850] The percent encapsulation of luciferase mRNA was measured by the fluorescence-based RNA quantification assay Ribogreen (ThermoFisher Scientific). LNP samples were diluted in 1×TE buffer and mixed with the Ribogreen reagent per manufacturer's recommendations and measured on a i3 SpectraMax spectrophotomer (Molecular Devices) using 644 nm excitation and 673 nm emission wavelengths. To determine the percent encapsulation, LNPs were measured using the Ribogreen assay with intact LNPs and disrupted LNPs, where the particles were incubated with 1× TE buffer containing 0.2% (w/w) Triton-X100 to disrupt particles to allow encapsulated RNA to interact with the Ribogreen reagent. The samples were again measured on the i3 SpectraMax spectrophotometer to determine the total amount of RNA present. Total RNA was subtracted from the amount of RNA detected when the LNPs were intact to determine the fraction encapsulated. Values were multiplied by 100 to determine the percent encapsulation. The Firefly Luciferase mRNA-LNPs that were measured by Ribogreen and the percent RNA encapsulation is reported in Table A3.

TABLE A3
RNA encapsulation after LNP formulation

| LNP ID | Ionizable Lipid | % mRNA encapsulation |
|---|---|---|
| LNPV019-002 | LIPIDV005 | 98 |
| LNPV006-006 | LIPIDV004 | 92 |
| LNPV011-003 | LIPIDV003 | 97 |

### Example 39: In Vitro Activity Testing of mRNA-LNPs in Primary Hepatocytes

[0851] In this example, LNPs comprising the luciferase reporter mRNA were used to deliver the RNA cargo into cells in culture. Primary mouse or primary human hepatocytes were thawed and plated in collagen-coated 96-well tissue culture plates at a density of 30,000 or 50,000 cells per well, respectively. The cells were plated in 1× William's Media E with no phenol red and incubated at 37° C. with 5% CO₂. After 4 hours, the medium was replaced with maintenance medium (lx William's Media E with no phenol containing Hepatocyte Maintenance Supplement Pack (ThermoFisher Scientific)) and cells were grown overnight at 37° C. with 5% CO₂. Firefly Luciferase mRNA-LNPs were thawed at 4° C. and gently mixed. The LNPs were diluted to the appropriate concentration in maintenance media containing 7.5% fetal bovine serum. The LNPs were incubated at 37° C. for 5 minutes prior to being added to the plated primary hepatocytes. To assess delivery of RNA cargo to cells, LNPs were incubated with primary hepatocytes for 24 hours and cells were then harvested and lysed for a Luciferase activity assay. Briefly, medium was aspirated from each well followed by a wash with 1×PBS. The PBS was aspirated from each well and 200 μL passive lysis buffer (PLB) (Promega) was added back to each well and then placed on a plate shaker for 10 minutes. The lysed cells in PLB were frozen and stored at −80° C. until luciferase activity assay was performed.

[0852] To perform the luciferase activity assay, cellular lysates in passive lysis buffer were thawed, transferred to a round bottom 96-well microtiter plate and spun down at 15,000 g at 4° C. for 3 min to remove cellular debris. The concentration of protein was measured for each sample using the Pierce™ BCA Protein Assay Kit (ThermoFisher Scientific) according to the manufacturer's instructions. Protein concentrations were used to normalize for cell numbers and determine appropriate dilutions of lysates for the luciferase assay. The luciferase activity assay was performed in white-walled 96-well microtiter plates using the luciferase assay reagent (Promega) according to manufacturer's instructions and luminescence was measured using an i3X SpectraMax plate reader (Molecular Devices). The results of the dose-response of Firefly luciferase activity mediated by the Firefly mRNA-LNPs are shown in FIG. 37 and indicate successful LNP-mediated delivery of RNA into primary cells in culture. As shown in FIG. 37A, LNPs formulated as according to Example 38 were analyzed for delivery of cargo to primary human (A) and mouse (B) hepatocytes, as according to Example 39. The luciferase assay revealed dose-responsive luciferase activity from cell lysates, indicating successful delivery of RNA to the cells and expression of Firefly luciferase from the mRNA cargo.

### Example 40: LNP-Mediated Delivery of RNA to the Mouse Liver

[0853] To measure the effectiveness of LNP-mediated delivery of firefly luciferase containing particles to the liver, LNPs were formulated and characterized as described in Example 60 and tested in vitro prior (Example 39) to administration to mice. C57BL/6 male mice (Charles River Labs) at approximately 8 weeks of age were dosed with LNPs via intravenous (i.v.) route at 1 mg/kg. Vehicle control animals were dosed i.v. with 300 μL phosphate buffered saline. Mice were injected via intraperitoneal route with dexamethasone at 5 mg/kg 30 minutes prior to injection of LNPs. Tissues were collected at necropsy at or 6, 24, 48 hours after LNP administration with a group size of 5 mice per time point. Liver and other tissue samples were collected, snap-frozen in liquid nitrogen, and stored at −80° C. until analysis. Frozen liver samples were pulverized on dry ice and transferred to homogenization tubes containing lysing matrix D beads (MP Biomedical). Ice-cold 1× luciferase cell culture lysis reagent (CCLR) (Promega) was added to each tube and the samples were homogenized in a Fast Prep-24 5G Homogenizer (MP Biomedical) at 6 m/s for 40 seconds. The samples were transferred to a clean microcentrifuge tube and clarified by centrifugation. Prior to luciferase activity assay, the protein concentration of liver homogenates was determined for each sample using the Pierce™ BCA Protein Assay Kit (ThermoFisher Scientific) according to the manufacturer's instructions. Luciferase activity was measured with 200 μg (total protein) of liver homogenate using the luciferase assay reagent (Promega) according to manufacturer's instructions using an i3X SpectraMax plate reader (Molecular Devices). Liver samples revealed successful delivery of mRNA by all lipid formulations, with reporter activity following the ranking LIPIDV005>LIPIDV004>LIPIDV003 (FIG. 38). As shown in FIG. 38, Firefly luciferase mRNA-containing LNPs were formulated and delivered to mice by iv, and liver samples were harvested and assayed for luciferase activity at 6, 24, and 48 hours post administration. Reporter activity by the various formulations followed the ranking LIPIDV005>LIPIDV004>LIPIDV003. RNA expression was transient and enzyme levels returned near vehicle background by 48 hours. Post-administration. This assay validated the use of these ionizable lipids and their respective formulations for RNA systems for delivery to the liver.

[0854] Without wishing to be limited by example, the lipids and formulations described in this example are support the efficacy for the in vivo delivery of other RNA molecules beyond a reporter mRNA. All-RNA Gene Writing systems can be delivered by the formulations described herein. For example, all-RNA systems employing a Gene Writer polypeptide mRNA, Template RNA, and an optional second-nick gRNA are described for editing the genome in vitro by nucleofection, using modified nucleotides, by lipofection, and for editing primary T cells. As described in this application, these all-RNA systems have many unique advantages in cellular immunogenicity and toxicity, which is of importance when dealing with more sensitive primary cells, especially immune cells, e.g., T cells, as opposed to immortalized cell culture cell lines. Further, it is contemplated that these all RNA systems could be targeted to alternate tissues and cell types using novel lipid delivery systems as referenced herein, e.g., for delivery to the liver, the lungs, muscle, immune cells, and others, given the function of Gene Writing systems has been validated in multiple cell types in vitro here, and the function of other RNA systems delivered with targeted LNPs is known in the art. The in vivo delivery of Gene Writing systems has potential for great impact in many therapeutic areas, e.g., correcting pathogenic mutations), instilling protective variants, and enhancing cells endogenous to the body, e.g., T cells. Given an appropriate formulation, all-RNA Gene Writing is conceived to enable the manufacture of cell-based therapies in situ in the patient.

### Example 41: Improvement of Expression of Cas-RT Fusions Through Linker Selection

[0855] This example demonstrates the optimization of Cas-RT fusions to improve protein expression in mammalian cells. Construction of novel Cas-RT fusions by the simple substitution of new functional domains may result in low or moderate expression of the Gene Writer polypeptide. Thus, it is contemplated here that modified configurations of the fusion may be advantageous in the context of different domains. Without wishing to be limited by the example, one such approach for improving the expression and stability of new fusions is through the use of a linker library. Here, the peptide linker sequence between the Cas and RT domains of the Cas-RT fusion is varied using a library of linker sequences. More specifically, linkers from Table 38B were used to generate new variants of a Cas9-RT fusion construct previously demonstrating low protein expression and delivered to human cells to screen for improved Cas-RT protein expression.

[0856] A set of 22 peptide linkers (Table 38B) with varying degrees of length, flexibility, hydrophobicity, and secondary structure was first used to generate variants of a Cas-RT fusion protein by substitution of the original linker (SQ TD NO: 480). HEK293T cells were transfected by electroporation of 250,000 cells/well with ˜800 ng of each Cas9-RT fusion plasmid along with 200 ng of a single-guide RNA plasmid. To assess the expression level of Cas9-RT fusions, cell lysates were collected on day 2 post-transfection and analyzed by Western blot using a primary antibody against Cas9. linker 10 (SEQ ID NO: 468) listed in Table 38 B significantly improved Cas-RT fusion expression (FIG. 39), demonstrating the potentially profound impact of the peptide linker sequence on Cas-RT expression.

TABLE 38B
Peptide sequences used as linkers between
the Cas and RT domains in Gene Writer
polypeptides comprising Cas-RT fusions

| | | | Seq Id. |
|---|---|---|---|
| # | Linker sequence | Notes | No. |
| 1 | GGS | Short | |
| 2 | GGGGS | Flexible, short | 460 |
| 3 | (GGGGS)₂ | Flexible | 461 |
| 4 | (GGGGS)₃ | Flexible, long | 462 |
| 5 | (GGGGS)₄ | Flexible, very | 463 |
| | | long | |
| 6 | (G)₆ | Flexible | 464 |
| 7 | (G)₈ | Flexible | 465 |
| 8 | GSAGSAAGSGEF | Flexible | 466 |
| 9 | (GSSGSS) | Mid | 467 |
| 10 | (GSSGSS)₂ | Mid, Flexible | 468 |
| 11 | (GSSGSS)₂ | Mid | 469 |
| 12 | SGSETPGTSESATPES | XTEN | 470 |
| 13 | (EAAAK) | Rigid helix, | 471 |
| | | short | |
| 14 | (EAAAK)₂ | Rigid helix, | 472 |
| | | mid | |
| 15 | (EAAAK)₃ | Rigid helix, | 473 |
| | | long | |
| 16 | PAP | Rigid, short | |
| 17 | PAPAP | Rigid, short | 475 |
| 18 | PAPAPAPAP | Rigid, mid | 476 |
| 19 | A(EAAAK)₄ALEA(EAAAK)₄A | Rigid, very | 477 |
| | | long with | |
| | | helices | |
| 20 | GGGGS(EAAAK)GGGGS | Flexible - | 478 |
| | | helix - flex | |
| 21 | (EAAAK)GGGGS(EAAAK) | Helix - flex - | 479 |
| | | helix | |
| 22 | SGGSSGGSSGSETPGTSESATP | Flexible - | 480 |
| | ESSGGSSGGSS | XTEN - | |
| | | flexible | |

[0857] Without wishing to be limited by example, the lipids and formulations described in this example are support the efficacy for the in vivo delivery of other RNA molecules beyond a reporter mRNA. All-RNA Gene Writing systems can be delivered by the formulations described herein. For example, all-RNA systems employing a Gene Writer polypeptide mRNA, Template RNA, and an optional second-nick gRNA are described for editing the genome in vitro by nucleofection, using modified nucleotides, by lipofection, and for editing primary T cells. As described in this application, these all-RNA systems have many unique advantages in cellular immunogenicity and toxicity, which is of importance when dealing with more sensitive primary cells, especially immune cells, e.g., T cells, as opposed to immortalized cell culture cell lines. Further, it is contemplated that these all RNA systems could be targeted to alternate tissues and cell types using novel lipid delivery systems as referenced herein, e.g., for delivery to the liver, the lungs, muscle, immune cells, and others, given the function of Gene Writing systems has been validated in multiple cell types in vitro here, and the function of other RNA systems delivered with targeted LNPs is known in the art. The in vivo delivery of Gene Writing systems has potential for great impact in many therapeutic areas, e.g., correcting pathogenic mutations), instilling protective variants, and enhancing cells endogenous to the body, e.g., T cells. Given an appropriate formulation, all-RNA Gene Writing is conceived to enable the manufacture of cell-based therapies in situ in the patient.

[0858] It should be understood that for all numerical bounds describing some parameter in this application, such as “about,” “at least,” “less than,” and “more than,” the description also necessarily encompasses any range bounded by the recited values. Accordingly, for example, the description “at least 1, 2, 3, 4, or 5” also describes, inter alia, the ranges 1-2, 1-3, 1-4, 1-5, 2-3, 2-4, 2-5, 3-4, 3-5, and 4-5, et cetera.

[0859] For all patents, applications, or other reference cited herein, such as non-patent literature and reference sequence information, it should be understood that they are incorporated by reference in their entirety for all purposes as well as for the proposition that is recited. Where any conflict exists between a document incorporated by reference and the present application, this application will control. All information associated with reference gene sequences disclosed in this application, such as GeneIDs or accession numbers (typically referencing NCBI accession numbers), including, for example, genomic loci, genomic sequences, functional annotations, allelic variants, and reference mRNA (including, e.g., exon boundaries or response elements) and protein sequences (such as conserved domain structures), as well as chemical references (e.g., PubChem compound, PubChem substance, or PubChem Bioassay entries, including the annotations therein, such as structures and assays, et cetera), are hereby incorporated by reference in their entirety.

[0860] Headings used in this application are for convenience only and do not affect the interpretation of this application.

LENGTHY TABLES
The patent application contains a lengthy table section. A copy of the table is available in electronic form from the USPTO web site (https://seqdata.uspto.gov/?pageRequest=docDetail&DocID=US20230242899A1). An electronic copy of the table will also be available from the USPTO upon request and payment of the fee set forth in 37 CFR 1.19(b)(3).

1. A system for modifying DNA comprising:
(a) a polypeptide or a nucleic acid encoding a polypeptide, wherein the polypeptide comprises (i) a retrotransposase reverse transcriptase domain and (ii) a retrotransposase endonuclease domain; and
(b) a template RNA (or DNA encoding the template RNA) comprising (i) a sequence that binds the polypeptide and (ii) a heterologous object sequence,
wherein:
(I) the polypeptide comprises a mutation inactivating and/or deleting a nucleolar localization signal,
(II) the system is capable of cutting the first strand and the second strand of the target DNA, and
wherein the distance between the cuts is the same as the distance between cuts made by the retrotransposase endonuclease domain, e.g., the endonuclease domain of a naturally occurring retrotransposase:
(III) (a), (b), or (a) and (b) further comprises a 5′ UTR and/or 3′ UTR operably linked to the sequence encoding the polypeptide, the heterologous object sequence (e.g., a coding sequence contained in the heterologous object sequence), or both:
(IV) the template RNA, or the DNA encoding the template RNA, further comprises (iii) a ribozyme that is heterologous to (a)(i), (a)(ii), (b)(i), or a combination thereof;
(V) the template RNA, or the DNA encoding the template RNA, further comprises (iii) a 5′ UTR capable of being cleaved into a fragment and a cleaved template RNA, wherein the 5′ UTR is optionally the sequence that binds the polypeptide, wherein the 5′ UTR comprises one or more mutations which increase the affinity of the fragment for the cleaved template RNA;
(VI) (a), (b), or (a) and (b) comprise an intron that increases the expression of the polypeptide, the heterologous object sequence (e.g., a coding sequence situated in the heterologous object sequence), or both;
(VII) the heterologous object sequence comprises a sequence, e.g., a gene or fragment thereof, of any of Tables 10A-10D or 11A-11G:
(VIII) the polypeptide is modified for enhanced activity or altered specificity; or
(IX) the template RNA comprises one or more chemical modification selected from dihydrouridine, inosine, 7-methylguanosine, 5-methylcytidine (5mC), 5′ Phosphate ribothymidine, 2′-O-methyl ribothymidine, 2′-O-ethyl ribothymidine, 2′-fluoro ribothymidine, C-5 propynyl-deoxycytidine (pdC), C-5 propynyl-deoxyuridine (pdU), C-5 propynyl-cytidine (pC), C-5 propynyl-uridine (pU), 5-methyl cytidine, 5-methyl uridine, 5-methyl deoxycytidine, 5-methyl deoxyuridine methoxy, 2,6-diaminopurine, 5′-Dimethoxytrityl-N4-ethyl-2′-deoxycytidine, C-5 propynyl-f-cytidine (pfC), C-5 propynyl-f-uridine (pfU), 5-methyl f-cytidine, 5-methyl f-uridine, C-5 propynyl-m-cytidine (pmC), C-5 propynyl-f-uridine (pmU), 5-methyl m-cytidine, 5-methyl m-uridine, LNA (locked nucleic acid), MGB (minor groove binder) pseudouridine (Ψ), 1-N-methylpseudouridine (1-Me-Ψ), or 5-methoxyuridine (5-MO-U).

2. A system for modifying DNA comprising:
(a) a polypeptide or a nucleic acid encoding a polypeptide, wherein the polypeptide comprises (i) a first target DNA binding domain, comprising a first Zn finger domain or TAL domain, (ii) a retrotransposase reverse transcriptase domain, (iii) a retrotransposase endonuclease domain, and (iv) a second target DNA binding domain e.g., comprising a second Zn finger domain or TAL domain, heterologous to the first target DNA binding domain; and
optionally (b) a template RNA (or DNA encoding the template RNA) comprising (i) a sequence that binds the polypeptide and (ii) a heterologous object sequence,
wherein (a) binds to a smaller number of target DNA sequences in a target cell than a similar polypeptide that comprises only the first target DNA binding domain, e.g., wherein the presence of the second target DNA binding domain in the polypeptide with the first DNA binding domain refines the target sequence specificity of the polypeptide relative to the polypeptide target sequence specificity of the polypeptide comprising only the first target DNA binding domain.

3. A system for modifying DNA comprising:
(a) a polypeptide or a nucleic acid encoding a polypeptide, wherein the polypeptide comprises (i) a retrotransposase reverse transcriptase domain and (ii) a retrotransposase endonuclease domain; and
optionally, (b) a template RNA (or DNA encoding the template RNA) comprising (i) a sequence that binds the polypeptide and (ii) a heterologous object sequence,
wherein the system is capable of cutting the first strand of the target DNA at least twice (e.g., twice), and
optionally wherein the cuts are at least 2, 3, 4, 5, 6, 7, 8, 9, 10, 15, 20, 25, 30, 40, 50, 60, 70, 80, 90, 100, or 200 nucleotides away one another (and optionally no more than 500, 400, 300, 200, or 100 nucleotides away from one another).

4. (canceled)

5. A system for modifying DNA comprising:
(a) a polypeptide or a nucleic acid encoding the polypeptide, wherein the polypeptide comprises (i) a retrotransposase reverse transcriptase (RT) domain, (ii) a retrotransposase DNA-binding domain (DBD); and (iii) a retrotransposase endonuclease domain, e.g., a nickase domain; and
(b) a template RNA (or DNA encoding the template RNA) comprising (e.g., from 5′ to 3′) (i) optionally a sequence that binds a target site (e.g., a second strand of a site in a target genome), (ii) optionally a sequence that binds the polypeptide, (iii) a heterologous object sequence, and (iv) a 3′ target homology domain;
wherein:
(i) the polypeptide comprises a heterologous targeting domain (e.g., in the DBD or the endonuclease domain) that binds specifically to a sequence comprised in the target site; and/or
(ii) the template RNA comprises a heterologous homology sequence having at least 85%, 90%, 95%, 96%, 97%, 98%, 99%, or 100% homology to a sequence comprised in a target site.

6. A system for modifying DNA comprising:
(a) a polypeptide or a nucleic acid encoding a polypeptide, wherein the polypeptide comprises (i) a retrotransposase target DNA binding domain, (ii) a retrotransposase reverse transcriptase domain, optionally (iii) a retrotransposase endonuclease domain, wherein the polypeptide comprises a heterologous linker replacing a portion of (i), (ii), or (iii), or replacing an endogenous linker connecting two of (i), (ii), or (iii); and
optionally (b) a template RNA (or DNA encoding the template RNA) comprising (i) a sequence that binds the polypeptide and (ii) a heterologous object sequence.

7. The system of claim 1, wherein the polypeptide of (a) comprises a target DNA binding domain (e.g., the retrotransposase endonuclease domain comprises a target DNA binding domain), e.g., a first target DNA binding domain.

8. The system of claim 7, wherein the polypeptide of (a) further comprises a second target DNA binding domain.

9. The system of claim 8, wherein the polypeptide of (a) binds to a smaller number of target DNA sequences than a similar polypeptide that comprises only the first target DNA binding domain or the second target DNA binding domain.

10. The system of claim 8, wherein the second target DNA binding domain comprises a CRISPR/Cas protein, a TAL Effector domain, a Zn finger domain, or a meganuclease domain.

11. The system of claim 8, wherein the second DNA binding domain binds to a sequence in a genomic safe harbor (GSH) site.

12. The system of claim 1, wherein the polypeptide further comprises a second endonuclease domain.

13. The system of claim 1, wherein (a), (b), or (a) and (b) comprise an intron that increases the expression of the polypeptide, the heterologous object sequence (e.g., a coding sequence situated in the heterologous object sequence), or both.

14. The system of claim 1, wherein the system comprises one or more circular RNA molecules (circRNAs), e.g., encoding the polypeptide or the template RNA.

15. A lipid nanoparticle comprising the system of claim 1.

16. A method of modifying a target DNA strand in a cell, tissue or subject, comprising administering a system to a cell, wherein the system comprises:
(a) a polypeptide or a nucleic acid encoding a polypeptide, wherein the polypeptide comprises (i) a retrotransposase reverse transcriptase domain and (ii) a retrotransposase endonuclease domain; and
(b) a template RNA (or DNA encoding the template RNA) comprising (i) a sequence that binds the polypeptide and (ii) a heterologous object sequence,
wherein the system reverse transcribes the template RNA sequence into the target DNA strand, thereby modifying the target DNA strand, and
wherein the cell has decreased Rad51 repair pathway activity, decreased expression of Rad51 or a component of the Rad51 repair pathway, or does not comprise a functional Rad51 repair pathway, e.g., does not comprise a functional Rad51 gene, e.g., comprises a mutation (e.g., deletion) inactivating one or both copies of the Rad51 gene or another gene in the Rad51 repair pathway.

The application's sequence listing, which the Patent Office published only in electronic form, follows.

SEQUENCE LISTING (2043 sequences)

SEQ ID NO: 1-43 - skipped (43 entries)

SEQ ID NO: 44 - DNA, 60 bp, synthetic construct
  source 1..60: mol_type = other DNA; note = Description of Artificial Sequence: Synthetic oligonucleotide
tagcaagttaaaataaggctagtccgttatcaacttgaaaaagtggcaccgagtcggtgc

SEQ ID NO: 45-385 - skipped (341 entries)

SEQ ID NO: 386 - DNA, 24 bp, synthetic construct
  source 1..24: mol_type = other DNA; note = Description of Artificial Sequence: Synthetic oligonucleotide
gttgtagctccctttctcatttcg

SEQ ID NO: 387 - DNA, 93 bp, synthetic construct
  source 1..93: mol_type = other DNA; note = Description of Artificial Sequence: Synthetic oligonucleotide
cgaaatgagaaccgttgctacaataaggccgtctgaaaagatgtgccgcaacgctctgccccttaaagcttctgctttaaggggcatcgttta

SEQ ID NO: 388 - DNA, 25 bp, synthetic construct
  source 1..25: mol_type = other DNA; note = Description of Artificial Sequence: Synthetic oligonucleotide
gttgtagctccctttttcatttcgc

SEQ ID NO: 389 - DNA, 87 bp, synthetic construct
  source 1..87: mol_type = other DNA; note = Description of Artificial Sequence: Synthetic oligonucleotide
gcgaaatgaaaaacgttgttacaataagagatgaatttctcgcaaagctctgcctcttgaaatttcggtttcaagaggcatcttttt

SEQ ID NO: 390 - DNA, 14 bp, synthetic construct
  source 1..14: mol_type = other DNA; note = Description of Artificial Sequence: Synthetic oligonucleotide
gttttagtactctg

SEQ ID NO: 391 - DNA, 58 bp, synthetic construct
  source 1..58: mol_type = other DNA; note = Description of Artificial Sequence: Synthetic oligonucleotide
cagaatctactaaaacaaggcaaaatgccgtgtttatctcgtcaacttgttggcgaga

SEQ ID NO: 392 - DNA, 18 bp, synthetic construct
  source 1..18: mol_type = other DNA; note = Description of Artificial Sequence: Synthetic oligonucleotide
gttttagtactctgtaat

SEQ ID NO: 393 - DNA, 62 bp, synthetic construct
  source 1..62: mol_type = other DNA; note = Description of Artificial Sequence: Synthetic oligonucleotide
attacagaatctactaaaacaaggcaaaatgccgtgtttatctcgtcaacttgttggcgaga

SEQ ID NO: 394 - DNA, 14 bp, synthetic construct
  source 1..14: mol_type = other DNA; note = Description of Artificial Sequence: Synthetic oligonucleotide
gttttagtactctg

SEQ ID NO: 395 - DNA, 63 bp, synthetic construct
  source 1..63: mol_type = other DNA; note = Description of Artificial Sequence: Synthetic oligonucleotide
cagaatctactaaaacaaggcaaaatgccgtgtttatctcgtcaacttgttggcgagattttt

SEQ ID NO: 396 - DNA, 14 bp, synthetic construct
  source 1..14: mol_type = other DNA; note = Description of Artificial Sequence: Synthetic oligonucleotide
gttttagtactctg

SEQ ID NO: 397 - DNA, 63 bp, synthetic construct; identical to SEQ ID NO: 395
  source 1..63: mol_type = other DNA; note = Description of Artificial Sequence: Synthetic oligonucleotide

SEQ ID NO: 398 - DNA, 12 bp, synthetic construct
  source 1..12: mol_type = other DNA; note = Description of Artificial Sequence: Synthetic oligonucleotide
gttttagagcta

SEQ ID NO: 399 - DNA, 60 bp, synthetic construct; identical to SEQ ID NO: 44
  source 1..60: mol_type = other DNA; note = Description of Artificial Sequence: Synthetic oligonucleotide

SEQ ID NO: 400 - DNA, 12 bp, synthetic construct
  source 1..12: mol_type = other DNA; note = Description of Artificial Sequence: Synthetic oligonucleotide
gttttagagcta

SEQ ID NO: 401 - DNA, 60 bp, synthetic construct; identical to SEQ ID NO: 44
  source 1..60: mol_type = other DNA; note = Description of Artificial Sequence: Synthetic oligonucleotide

SEQ ID NO: 402 - DNA, 17 bp, synthetic construct
  source 1..17: mol_type = other DNA; note = Description of Artificial Sequence: Synthetic oligonucleotide
gtttaagagctatgctg

SEQ ID NO: 403 - DNA, 65 bp, synthetic construct
  source 1..65: mol_type = other DNA; note = Description of Artificial Sequence: Synthetic oligonucleotide
cagcatagcaagtttaaataaggctagtccgttatcaacttgaaaaagtggcaccgagtcggtgc

SEQ ID NO: 404 - DNA, 12 bp, synthetic construct
  source 1..12: mol_type = other DNA; note = Description of Artificial Sequence: Synthetic oligonucleotide
gttttagagcta

SEQ ID NO: 405 - DNA, 60 bp, synthetic construct; identical to SEQ ID NO: 44
  source 1..60: mol_type = other DNA; note = Description of Artificial Sequence: Synthetic oligonucleotide

SEQ ID NO: 406 - DNA, 66 bp, synthetic construct
  source 1..66: mol_type = other DNA; note = Description of Artificial Sequence: Synthetic oligonucleotide
cagaagctacaaagataaggcttcatgccgaaatcaacaccctgtcattttatggcagggtgtttt

SEQ ID NO: 407 - DNA, 14 bp, synthetic construct
  source 1..14: mol_type = other DNA; note = Description of Artificial Sequence: Synthetic oligonucleotide
gtctttgtactctg

SEQ ID NO: 408 - DNA, 16 bp, synthetic construct
  source 1..16: mol_type = other DNA; note = Description of Artificial Sequence: Synthetic oligonucleotide
gctatagttccttact

SEQ ID NO: 409 - DNA, 127 bp, synthetic construct
  source 1..127: mol_type = other DNA; note = Description of Artificial Sequence: Synthetic polynucleotide
ggtaagttgctatagtaagggcaacagacccgaggcgttggggatcgcctagcccgtgtttacgggctctccccatattcaaaataatgacagacgagcaccttggagcatttatctccgaggtgct

SEQ ID NO: 410 - RNA, 14 nt, synthetic construct
  source 1..14: mol_type = other RNA; note = Description of Artificial Sequence: Synthetic oligonucleotide
gtcttagtactctg

SEQ ID NO: 411 - RNA, 65 nt, synthetic construct
  source 1..65: mol_type = other RNA; note = Description of Artificial Sequence: Synthetic oligonucleotide
cagaatctactaagacaaggcaaaatgccgtgtttatctcgtcaacttgttggcgagattttttt

SEQ ID NO: 412 - RNA, 14 nt, synthetic construct
  source 1..14: mol_type = other RNA; note = Description of Artificial Sequence: Synthetic oligonucleotide
gtcttagtactctg

SEQ ID NO: 413 - RNA, 65 nt, synthetic construct; identical to SEQ ID NO: 411
  source 1..65: mol_type = other RNA; note = Description of Artificial Sequence: Synthetic oligonucleotide

SEQ ID NO: 414 - RNA, 14 nt, synthetic construct
  source 1..14: mol_type = other RNA; note = Description of Artificial Sequence: Synthetic oligonucleotide
gtcttagtactctg

SEQ ID NO: 415 - RNA, 65 nt, synthetic construct; identical to SEQ ID NO: 411
  source 1..65: mol_type = other RNA; note = Description of Artificial Sequence: Synthetic oligonucleotide

SEQ ID NO: 416 - RNA, 14 nt, synthetic construct
  source 1..14: mol_type = other RNA; note = Description of Artificial Sequence: Synthetic oligonucleotide
gtcttagtactctg

SEQ ID NO: 417 - RNA, 65 nt, synthetic construct; identical to SEQ ID NO: 411
  source 1..65: mol_type = other RNA; note = Description of Artificial Sequence: Synthetic oligonucleotide

SEQ ID NO: 418 - RNA, 12 nt, synthetic construct
  source 1..12: mol_type = other RNA; note = Description of Artificial Sequence: Synthetic oligonucleotide
actggggttcag

SEQ ID NO: 419 - RNA, 76 nt, synthetic construct
  source 1..76: mol_type = other RNA; note = Description of Artificial Sequence: Synthetic oligonucleotide
ctgaacctcagtaagcattggctcgtttccaatgttgattgctccgccggtgctccttatttttaagggcgccggc

SEQ ID NO: 420 - DNA, 12 bp, synthetic construct
  source 1..12: mol_type = other DNA; note = Description of Artificial Sequence: Synthetic oligonucleotide
gttttagtccct

SEQ ID NO: 421 - RNA, 16 nt, synthetic construct
  source 1..16: mol_type = other RNA; note = Description of Artificial Sequence: Synthetic oligonucleotide
gtcatagttcccctga

SEQ ID NO: 422 - RNA, 98 nt, synthetic construct
  source 1..98: mol_type = other RNA; note = Description of Artificial Sequence: Synthetic oligonucleotide
tcagggttactatgataagggctttctgcctaaggcagactgacccgcggcgttggggatcgcctgtcgcccgcttttggcgggcattccccatcctt

SEQ ID NO: 423 - DNA, 12 bp, synthetic construct
  source 1..12: mol_type = other DNA; note = Description of Artificial Sequence: Synthetic oligonucleotide
gttttagagcta

SEQ ID NO: 424 - DNA, 63 bp, synthetic construct
  source 1..63: mol_type = other DNA; note = Description of Artificial Sequence: Synthetic oligonucleotide
agggactaaaataaagagtttgcgggactctgcggggttacaatcccctaaaaccgctttttt

SEQ ID NO: 425 - DNA, 24 bp, synthetic construct
  source 1..24: mol_type = other DNA; note = Description of Artificial Sequence: Synthetic oligonucleotide
gttgtagctccctttctcatttcg

SEQ ID NO: 426 - DNA, 93 bp, synthetic construct; identical to SEQ ID NO: 387
  source 1..93: mol_type = other DNA; note = Description of Artificial Sequence: Synthetic oligonucleotide

SEQ ID NO: 427 - DNA, 12 bp, synthetic construct
  source 1..12: mol_type = other DNA; note = Description of Artificial Sequence: Synthetic oligonucleotide
gttttagagcta

SEQ ID NO: 428 - DNA, 60 bp, synthetic construct; identical to SEQ ID NO: 44
  source 1..60: mol_type = other DNA; note = Description of Artificial Sequence: Synthetic oligonucleotide

SEQ ID NO: 429 - DNA, 12 bp, synthetic construct
  source 1..12: mol_type = other DNA; note = Description of Artificial Sequence: Synthetic oligonucleotide
gttttagagcta

SEQ ID NO: 430 - DNA, 60 bp, synthetic construct; identical to SEQ ID NO: 44
  source 1..60: mol_type = other DNA; note = Description of Artificial Sequence: Synthetic oligonucleotide

SEQ ID NO: 431 - DNA, 17 bp, synthetic construct
  source 1..17: mol_type = other DNA; note = Description of Artificial Sequence: Synthetic oligonucleotide
gtttaagagctatgctg

SEQ ID NO: 432 - DNA, 65 bp, synthetic construct; identical to SEQ ID NO: 403
  source 1..65: mol_type = other DNA; note = Description of Artificial Sequence: Synthetic oligonucleotide

SEQ ID NO: 433 - DNA, 17 bp, synthetic construct
  source 1..17: mol_type = other DNA; note = Description of Artificial Sequence: Synthetic oligonucleotide
gtttaagagctatgctg

SEQ ID NO: 434 - DNA, 65 bp, synthetic construct; identical to SEQ ID NO: 403
  source 1..65: mol_type = other DNA; note = Description of Artificial Sequence: Synthetic oligonucleotide

SEQ ID NO: 435 - DNA, 17 bp, synthetic construct
  source 1..17: mol_type = other DNA; note = Description of Artificial Sequence: Synthetic oligonucleotide
gtttaagagctatgctg

SEQ ID NO: 436 - DNA, 65 bp, synthetic construct; identical to SEQ ID NO: 403
  source 1..65: mol_type = other DNA; note = Description of Artificial Sequence: Synthetic oligonucleotide

SEQ ID NO: 437 - DNA, 12 bp, synthetic construct
  source 1..12: mol_type = other DNA; note = Description of Artificial Sequence: Synthetic oligonucleotide
gttttagagcta

SEQ ID NO: 438 - DNA, 60 bp, synthetic construct; identical to SEQ ID NO: 44
  source 1..60: mol_type = other DNA; note = Description of Artificial Sequence: Synthetic oligonucleotide

SEQ ID NO: 439 - DNA, 12 bp, synthetic construct
  source 1..12: mol_type = other DNA; note = Description of Artificial Sequence: Synthetic oligonucleotide
gttttagagcta

SEQ ID NO: 440 - DNA, 60 bp, synthetic construct; identical to SEQ ID NO: 44
  source 1..60: mol_type = other DNA; note = Description of Artificial Sequence: Synthetic oligonucleotide

SEQ ID NO: 441 - DNA, 12 bp, synthetic construct
  source 1..12: mol_type = other DNA; note = Description of Artificial Sequence: Synthetic oligonucleotide
gttttagagcta

SEQ ID NO: 442 - DNA, 60 bp, synthetic construct; identical to SEQ ID NO: 44
  source 1..60: mol_type = other DNA; note = Description of Artificial Sequence: Synthetic oligonucleotide

SEQ ID NO: 443 - DNA, 12 bp, synthetic construct
  source 1..12: mol_type = other DNA; note = Description of Artificial Sequence: Synthetic oligonucleotide
gttttagagcta

SEQ ID NO: 444 - DNA, 60 bp, synthetic construct; identical to SEQ ID NO: 44
  source 1..60: mol_type = other DNA; note = Description of Artificial Sequence: Synthetic oligonucleotide

SEQ ID NO: 445 - DNA, 12 bp, synthetic construct
  source 1..12: mol_type = other DNA; note = Description of Artificial Sequence: Synthetic oligonucleotide
gttttagagcta

SEQ ID NO: 446 - DNA, 60 bp, synthetic construct; identical to SEQ ID NO: 44
  source 1..60: mol_type = other DNA; note = Description of Artificial Sequence: Synthetic oligonucleotide

SEQ ID NO: 447 - DNA, 17 bp, synthetic construct
  source 1..17: mol_type = other DNA; note = Description of Artificial Sequence: Synthetic oligonucleotide
gtttaagagctatgctg

SEQ ID NO: 448 - DNA, 65 bp, synthetic construct; identical to SEQ ID NO: 403
  source 1..65: mol_type = other DNA; note = Description of Artificial Sequence: Synthetic oligonucleotide

SEQ ID NO: 449 - DNA, 17 bp, synthetic construct
  source 1..17: mol_type = other DNA; note = Description of Artificial Sequence: Synthetic oligonucleotide
gtttaagagctatgctg

SEQ ID NO: 450 - DNA, 65 bp, synthetic construct; identical to SEQ ID NO: 403
  source 1..65: mol_type = other DNA; note = Description of Artificial Sequence: Synthetic oligonucleotide

SEQ ID NO: 451 - DNA, 14 bp, synthetic construct
  source 1..14: mol_type = other DNA; note = Description of Artificial Sequence: Synthetic oligonucleotide
gtctttgtactctg

SEQ ID NO: 452 - DNA, 66 bp, synthetic construct; identical to SEQ ID NO: 406
  source 1..66: mol_type = other DNA; note = Description of Artificial Sequence: Synthetic oligonucleotide

SEQ ID NO: 453 - DNA, 14 bp, synthetic construct
  source 1..14: mol_type = other DNA; note = Description of Artificial Sequence: Synthetic oligonucleotide
gtctttgtactctg

SEQ ID NO: 454 - DNA, 66 bp, synthetic construct; identical to SEQ ID NO: 406
  source 1..66: mol_type = other DNA; note = Description of Artificial Sequence: Synthetic oligonucleotide

SEQ ID NO: 455 - DNA, 14 bp, synthetic construct
  source 1..14: mol_type = other DNA; note = Description of Artificial Sequence: Synthetic oligonucleotide
gtctttgtactctg

SEQ ID NO: 456 - DNA, 66 bp, synthetic construct; identical to SEQ ID NO: 406
  source 1..66: mol_type = other DNA; note = Description of Artificial Sequence: Synthetic oligonucleotide

SEQ ID NO: 457 - DNA, 14 bp, synthetic construct
  source 1..14: mol_type = other DNA; note = Description of Artificial Sequence: Synthetic oligonucleotide
gtctttgtactctg

SEQ ID NO: 458 - DNA, 66 bp, synthetic construct; identical to SEQ ID NO: 406
  source 1..66: mol_type = other DNA; note = Description of Artificial Sequence: Synthetic oligonucleotide

SEQ ID NO: 459 - skipped

SEQ ID NO: 460 - protein, 5 aa, synthetic construct
  source 1..5: note = Description of Artificial Sequence: Synthetic peptide
GGGGS

SEQ ID NO: 461 - protein, 10 aa, synthetic construct
  source 1..10: note = Description of Artificial Sequence: Synthetic peptide
GGGGSGGGGS

SEQ ID NO: 462 - protein, 15 aa, synthetic construct
  source 1..15: note = Description of Artificial Sequence: Synthetic peptide
GGGGSGGGGSGGGGS

SEQ ID NO: 463 - protein, 20 aa, synthetic construct
  source 1..20: note = Description of Artificial Sequence: Synthetic peptide
GGGGSGGGGSGGGGSGGGGS

SEQ ID NO: 464 - protein, 6 aa, synthetic construct
  source 1..6: note = Description of Artificial Sequence: Synthetic peptide
GGGGGG

SEQ ID NO: 465 - protein, 8 aa, synthetic construct
  source 1..8: note = Description of Artificial Sequence: Synthetic peptide
GGGGGGGG

SEQ ID NO: 466 - protein, 12 aa, synthetic construct
  source 1..12: note = Description of Artificial Sequence: Synthetic peptide
GSAGSAAGSGEF

SEQ ID NO: 467 - protein, 6 aa, synthetic construct
  source 1..6: note = Description of Artificial Sequence: Synthetic peptide
GSSGSS

SEQ ID NO: 468 - protein, 12 aa, synthetic construct
  source 1..12: note = Description of Artificial Sequence: Synthetic peptide
GSSGSSGSSGSS

SEQ ID NO: 469 - protein, 18 aa, synthetic construct
  source 1..18: note = Description of Artificial Sequence: Synthetic peptide
GSSGSSGSSGSSGSSGSS

SEQ ID NO: 470 - protein, 16 aa, synthetic construct
  source 1..16: note = Description of Artificial Sequence: Synthetic peptide
SGSETPGTSESATPES

SEQ ID NO: 471 - protein, 5 aa, synthetic construct
  source 1..5: note = Description of Artificial Sequence: Synthetic peptide
EAAAK

SEQ ID NO: 472 - protein, 10 aa, synthetic construct
  source 1..10: note = Description of Artificial Sequence: Synthetic peptide
EAAAKEAAAK

SEQ ID NO: 473 - protein, 15 aa, synthetic construct
  source 1..15: note = Description of Artificial Sequence: Synthetic peptide
EAAAKEAAAKEAAAK

SEQ ID NO: 474 - skipped

SEQ ID NO: 475 - protein, 5 aa, synthetic construct
  source 1..5: note = Description of Artificial Sequence: Synthetic peptide
PAPAP

SEQ ID NO: 476 - protein, 9 aa, synthetic construct
  source 1..9: note = Description of Artificial Sequence: Synthetic peptide
PAPAPAPAP

SEQ ID NO: 477 - protein, 46 aa, synthetic construct
  source 1..46: note = Description of Artificial Sequence: Synthetic polypeptide
AEAAAKEAAAKEAAAKEAAAKALEAEAAAKEAAAKEAAAKEAAAKA

SEQ ID NO: 478 - protein, 15 aa, synthetic construct
  source 1..15: note = Description of Artificial Sequence: Synthetic peptide
GGGGSEAAAKGGGGS

SEQ ID NO: 479 - protein, 15 aa, synthetic construct
  source 1..15: note = Description of Artificial Sequence: Synthetic peptide
EAAAKGGGGSEAAAK

SEQ ID NO: 480 - protein, 33 aa, synthetic construct
  source 1..33: note = Description of Artificial Sequence: Synthetic polypeptide
SGGSSGGSSGSETPGTSESATPESSGGSSGGSS

SEQ ID NO: 481 - RNA, 21 nt, Homo sapiens
  source 1..21: mol_type = unassigned RNA
cataaagtagaaagcactact

SEQ ID NO: 482 - RNA, 23 nt, Homo sapiens
  source 1..23: mol_type = unassigned RNA
tgtagtgtttcctactttatgga

SEQ ID NO: 483 - RNA, 24 nt, Homo sapiens
  source 1..24: mol_type = unassigned RNA
tttggcaatggtagaactcacact

SEQ ID NO: 484 - RNA, 21 nt, Homo sapiens
  source 1..21: mol_type = unassigned RNA
tggttctagacttgccaacta

SEQ ID NO: 485 - RNA, 22 nt, Homo sapiens
  source 1..22: mol_type = unassigned RNA
tatggcactggtagaattcact

SEQ ID NO: 486 - RNA, 22 nt, Homo sapiens
  source 1..22: mol_type = unassigned RNA
gtgaattaccgaagggccataa

SEQ ID NO: 487-1015 - skipped (529 entries)

SEQ ID NO: 1016 - protein, 1390 aa, synthetic construct
  source 1..1390: note = Description of Artificial Sequence: Synthetic polypeptide
MASCPKPGPPVSAGAMSLESGLTTHSVLAIERGPNSLANSGSDFGGGGLGLPLRLLRVSVGTQTSRSDWVDLVSWSHPGPTSKSQQVDLVSLFPKHRVDLLSKNDQVDLVAQFLPSKFPPNLAENDLALLVNLEFYRSDLHVYECVHFAAHWEGLSGLPEVYEQLAPQPCVGETLHSSLPRDSELFVPEEGSSEKESEDAPKTSPPTPGKHGLEQTGEEKVMVTVPDKNPPCPCCGTRVNSVLNLIEHLKVSHGKRGVCFRCAKCGKENSNYHSVVCHFPKCRGPETEKAPAGEWICEVCNRDFTTKIGLGQHKRLAHPAVRNQERIVASQPKETSNRGAHKRCWTKEEEELLIRLEAQFEGNKNINKLIAEHITTKTAKQISDKRRLLSRKPAEEPREEPGTCHHTRRAAASLRTEPEMSHHAQAEDRDNGPGRRPLPGRAAAGGRTMDEIRRHPDKGNGQQRPTKQKSEEQLQAYYKKTLEERLSAGALNTFPRAFKQVMEGRDIKLVINQTAQDCFGCLESISQIRTATRDKKDTVTREKHPKKPFQKWMKDRAIKKGNYLRFQRLFYLDRGKLAKIILDDIECLSCDIPLSEIYSVFKTRWETTGSFKSLGDFKTYGKADNTAFRELITAKEIEKNVQEMSKGSAPGPDGITLGDVVKMDPEFSRTMEIFNLWLTTGKIPDMVRGCRTVLIPKSSKPDRLKDINNWRPITIGSILLRLFSRIVTARLSKACPLNPRQRGFIRAAGCSENLKLLQTIIWSAKREHRPLGVVFVDIAKAFDTVSHQHIIHALQQREVDPHIVGLVSNMYENISTYITTKRNTHTDKIQIRVGVKQGDPMSPLLFNLAMDPLLCKLEESGKGYHRGQSSITAMAFADDLVLLSDSWENMNTNISILETFCNLTGLKTQGQKCHGFYIKPTKDSYTINDCAAWTINGTPLNMIDPGESEKYLGLQFDPWIGIARSGLSTKLDFWLQRIDQAPLKPLQKTDILKTYTIPRLIYIADHSEVKTALLETLDQKIRTAVKEWLHLPPCTCDAILYSSTRDGGLGITKLAGLIPSVQARRLHRIAQSSDDTMKCFMEKEKMEQLHKKLWIQAGGDRENIPSIWEAPPSSEPPNNVSTNSEWEAPTQKDKFPKPCNWRKNEFKKWTKLASQGRGIVNFERDKISNHWIQYYRRIPHRKLLTALQLRANVYPTREFLARGRQDQYIKACRHCDADIESCAHIIGNCPVTQDARIKRHNYICELLLEEAKKKDWVVFKEPHIRDSNKELYKPDLIFVKDARALVVDVTVRYEAAKSSLEEAAAEKVRKYKHLETEVRHLTNAKDVTFVGFPLGARGKWHQDNFKLLTELGLSKSRQVKMAETFSTVALFSSVDIVHMFASRARKSMVM

SEQ ID NO: 1017-1022 - skipped (6 entries)

SEQ ID NO: 1023 - protein, 16 aa, synthetic construct
  source 1..16: note = Description of Artificial Sequence: Synthetic peptide
SGSETPGTSESATPES

SEQ ID NO: 1024 - protein, 4 aa, synthetic construct
  source 1..4: note = Description of Artificial Sequence: Synthetic peptide
GGGS

SEQ ID NO: 1025 - DNA, 4181 bp, Adineta vaga
  source 1..4181: mol_type = unassigned DNA
gaaatagtttgcaatggtaggtgtatggcgcctctgtgtctctctttcgctggatatagtttgacgattttgtaccaggtatctgtttcttgtgagttcagcaccagtttgaacaggcttagcgatagaccttcgaacttgaaacactgttgtgaagctggctgggcccctgcagattttctcgattagaacgtgagtgttacgtccagaatgacccaccagtggttagttctacgttgccctggaaaggagaaaagttgagctaaaatcgcacggcctagttgtttatcaaataggcacggtgaggaactcttctatgtaccctgactaaagtactcacttgtgcgctgggtttgctccccctcgcattgacttatctgatcgcactacccaccaaacgaaacataaacttagctcgtggtatcagtccacagcgtgtgcagtcggattcaggggagcgtgttagtgacaagcaggataatattaacatagttaatgttaaggcgttcaacattccttatccaattggaagagttgactgtgaagtttgtcatgaagacattggacaaatgaatttgccgattcgagagcatgccgtatctgtacacaatataaacaaatttaattatttatgccagctatgttctaagtcttatgatactattaatagtgttaaagctcactatgttgcatgcagaagacagaagaatgcctcatccacaacagctgttccaaccaatgtcatcaacaacaaccaacttgctataaatactaatcaagtaatatcaagaaatccacttcagtgcgttgagtgtctaatgaaacaagttgatttctatgctaaagatacaaaggcactagtcacgcacatgcgtactaaacatgctgctgcctacgaggaatcaaagaaagtcgcaacaagaagagttgcctggagccctgatgaggatcaaattcttgctgaactagaagtcaaattgaaaaagatacaaaaaggtcaattacttagtcgtcttgtcgttgaatataataaatgtgctgataaatcgaaagctccttccaggtccaaggatgctattcgtacaagacgccaacaacatgattacaaactattgcttcgctcactccaatctcaacaaccgccagttggtagcgaagacagtgacagtgacatatcttctagtaataacaatcctttaacaacaacacataatgtcactccaacgccagattcatccaacgttgtactactaatacaaaagatccgtgaatctgtagattccattgtaaaaataacgaacctcaaattgaacacgaatatgctgaacgcagcaagtgcgttcattaatcaaaataacaacatggatccacttgaactatctatgcgtggtatcgaagaggatgtgaaggcaattcgagacaaagaacttcagaaaccaaccaggaacgttccttcttcaacaacttcgagaaagccaactcgaaatgccaaaaggcttgagaaatcaaaaaaatatggctattatcaacatctgtactataataacaagaaaaaattagtagcggaaatcctcgatggcgaaacaagtggtgctaagccacctccaatgaacctggttgaagattattatagaaatatttggtcacgttctactattgatgattcgcctgttaacaatattaaaaccgttaatagtgactctatatttgctccaatttcgcgtgatgaaatcaaattagcattatcaaatacgaaaaaggattcagcagctggacctgacgctgtaacaataaaagaagcaaaagctattattgacaatctttatgttgcatataatatatggctaggtgttcaaggaattcctgaacaactgaaattgaataaaactatcttaattccaaaaggaaattccgatcttagtctactgaaaaactggcgacctattacaatctcgtctattatcctaagagtatacaacagattattagcatacagaatgaacaagatctttaaaactaatgataaacaagttggattcaaacctgttaatggttgtggtattaatatatcttggcttcactctctcttgaagcatgcacgcttaaacaaaaattcaatatatgcttgtcttgtcgatgtgtctaaagcctttgattctgtgtcacatcaatcaatagtaagagctctcacaatgaatggtgcaccatccttgctagtgaaattaataatggatcaatatacgaatgtaaatactgtcatcacatgttctggttctatatcaaacaagataaatatctccagtggtgtcaagcaaggtgacccactatctagcttgttgttcaatctggttatagatgaactgttcgatgtaataaaggaccaatatggttatacaattgataacattggcaccaccaatgcacgatgcttcgccgatgatttaacactaatatcatcatctagaatgggtatgaataaattgcttgagctcaccacgaaattcttcaaagaacgtggactaaatgtaaacccatcaaagtgcatgtctattggcatgtccaaaggttataaaggaaagaagagtaaaatcgaatctgaaccactcttctctatcaccgatgctcagataccgatgttgggctatattgataagacaactcgatatctcggtgtaaatttcacatctattggtgccattgatgcaaaaagaatcaaaaaagaccttcaggacacactcgataagcttgaacatcttaaactcaaagctcagtgcaaaatggatctcttacgaacttatatgataccaagattcatgtttcaattaattcatactgagttatatccgaaattgcttattaaaatggacatcttaattaggaaattagctaaacgaatcctacatctgcccatatcaacgagtagtgaattcttttacttacccttcaaagaaggaggtcttcaactaacctcacttaaagaagcagttggtttagccaaaataaaattacacaagaagataatgtccagtaatgatccaatgttatgctacttgattgagagccagaggagccgtattgtcgaacattttatgaaagaccttaaacttggagattctttaacattaaacgaaatgaataacatcaaagagtgcttcatgaaagaaaaaagaatctcatttgctcaaaaaattcacggtgtcggcttcgaagtattctcatcaagtcctttgacgaaccaatggattaatggcgaaattaagacaatgacaactaaaacatacattaactcaattaaacttagaacaaatactctagaaactcgggtaacaacatctcggggactgaacatcataaaaacatgtagaagatgccacgtagctgacgaaagtctcatgcatgtgctccaatgttgctcttctaccaaaggtttacgatactctcgtcatcacaaaatatgtgccaaagtagcaaataaattggtaatgaatggttatggtgtatttcgtgagaagagttatccagatccaaacaactcaggttcataccttcgaccggatataattgcagtaaaaaatggtcatgttattgttcttgatgtaacggttgtgtacgaagtaactggtgctacgtttattaatgcctaccaaacaaaaataaataaatataatgcgattatggtacaaatcgagcaaatgttcaattgtgttaatggtgaattgcatggtctagtaattggatcacgtggttcaattcatcacagtcaactccacatctggcatcaaatgggattctcttccatagaacttaaatatgtggctataggatgcatggaggattcgctcagaatcatgtccacattctcaaaagctatcacatgaactagtctccttcttctattagtcagtctaattaatttttcttacattctacatctagttccattattaaattggtatgatcagtgctatctctgctacactcaatgcttaatcgtatgttattgacagtctgacacttgattactcttacgacatatgcactgtttgcttcagagaaaccactgttcatatagtgaagttcctcagttttctgttgatatattcttctttcattctcgcttctccttttctactgtgttctttttatcagttttttgtggaaaaattgagaataaataaagt

SEQ ID NO: 1026 - DNA, 4204 bp, Oryzias latipes
  source 1..4204: mol_type = unassigned DNA
cgcacaggggacacagagcctgcccaagtaccgctcccgagggagcgggaaacgggggggtgactatcccctggggtccggcgagagcgctggtctacggaccaggggtggctgtgggcaggctgctcctcaggccagttgattagttacgcatgggctgtacctccacgtggtcccgctggtaacgacttgtcggctaaatcagcccgcccaccatctgggatatggttgaccgtctaaccccagtactcaggtcacaaacaaaatgggaacagatacagtgtatgtcggccaggactacccttctggcttatcaaaacgggtaccagcacggttagtggcgggaccgatgctgcgagagcgaagctgtcacgcccatgtgtttagggctggacacatgtggaactggcgaaccagccttccgagcgggcgctgggaccagcccgctttggagaagtctcgggtcctaacccggtcggtggcgacggccaccgaccccgaaattacctcttacccaggaaagtccgtatcgacaagtacgcaggttcaggaggaggactggtgtagccgggagagcgggtggatctcgccaggacttgctcctgaagaaccctcggtggtgtccgaaattacagcctccatggtagcgacaatgagggtagcaaccgaggaggtcgtgctggaaccacagcctgaacaggtcgtcacaatactgccggagcatggtcgaaacgttcctccggggctggcagaacaggacaccgccagccccatagaagtctcggtgctcctcccagacctcgctgagaactgcccattgtgtggcgtgccgagcgggggcctacgcttgctcgggaagcattttgctgtccgacatgcgggggtgcctgtaacgtatgagtgccgtaagtgtgcgtggcggagccccaacagccactcaatctcgtgtcacgtccccaaatgccgggggcgtgcgcggatgcccagtggcgatccagggatcgcctgcgatctctgtgaagcccggtttgccacggaggttggggtcgcccaacacaagcggcacgttcatccggtggagtggaacaaggtgaggctggaaaggagaggtgcgcgcggagggggaattaaggcgacgaagctctggagtgtagcggaggtagagacgctaatccggctcatccgtgagcacggagattcaggtgccacttaccagctcattgccgatgagctgggaaggggcaagacggccgaacaggtgaggagtaaaaagaggctcctgcgcatagatacggcaagcaatagcccagatgatgcagaggttgaggaggagaggttggaatctctggcggttcggtcctcgtcacggtcacccccgagcctggtggcgaccagggtcagggaggcagttgccaggggtgaatcagaaggtggcgaggagatcagggctattgctgctctcattagggacgtagatcagaatccttgtctgattgaaacctcggcgtcggacatcatctcgaagctgggaaggagggtggatgggcccaagagacccaggcccgttgtcagagaacagacccaagagaagggatgggtaaggcggcttgcccggcggaaaagggagtacagagaagcgcagtacctgtactcaagggatcaagcaaggctggcggcccagatcctcgatggtgccgccagccaggaatgcgccctcccggtggaccaggtctacggagcgttccgtgagaaatgggaaaccgtagggcagttccacggacttggtgagttccggacgggtgcacgcgcagacaactgggagttctactctccaattctggcggctgaggtgaaagaaaacctaatgagaatggctaacggcacggccccgggaccagacaggataagcaaaaaggctctgcttgactgggacccccggggtgagcaactggcacggctgtacacgacgtggctgatcggtggggtcataccaagggtcttcaaggagtgcaggactaagctgctaccgaaatccagcgacccggtcgagttgcaggacatcggtggatggaggccggtgacgattgggtcgatggtgactaggctgttcagtcggattctaacgatgaggctaacccgagcctgtccgatcaatccgaggcagcgcggtttcttggcctcctcgagtggatgcgcggaaaacctgttgatctttgacgagatcgtcaggcgctcgaggcgggacggggggccgctggcagtggtgtttgtggactttgcgagggcctttgactccatctcacatgaacatatcctgtgtgttctcgaagaaggcgggcttgacaggcacgttatcgggttgatccgaaactcgtacgtggattgcgtgaccagggtgggttgtgtcgagggcatgacaccaccaatacaaatgaaggttggagtgaagcagggagaccccatgtcccccttgctcttcaacctggctatggatcccctcatccataaactcgagacggccggaactggactgaaatggggcgatctttcaatcgccacgctggcctttgccgacgatctggtgctggtgagtgactctgaggaaggcatggggaggagtctcgggattttggagaagttttgccaactgactgggctgagggttcagcccaggaagtgtcacggtttctttatggacaagggcgtggtgaacggctgtggaacctgggaaatctgtgggtcaccgatccacatgattcccccgggggaatcagttcgttatttgggagtccaggtaggcccggggcgcggcgtgatggaaccggatcttatccctacggtccacacgtggatcgaaaggatctcggaggctcctctaaagccctcacaacgcatgagggttttgaactcattcgctctcccccggataatttaccaggccgatctagggaaggttacggtaaccaaattggcccagatagatgggattgtccggaaggctgtgaagaagtggctccatttgtcaccatccacgtgcaatggactgctgtattcacggaaccgcgacggtggtttgggcctcctaaagctggaaagactaatcccatccgtgcgcacgaagcgtatctatcggatgtccaggtctccggatatctggacacggcgaatgaccagccattctgtgtcaaaatctgactgggagatgttgtgggtccaagcgggaggtgagaggggcagtgcacctgtaatgggtgccgtggaggctgccccgaccgatgtggagagatcgccagactacccagactggcggcgtgaggaaaacctggcatggtcggccctgcgggtgcagggtgtgggtgcagaccagtttcgaggcgacaggaccagcagctcttggatcgccgagcccgcttcggttgggttcgcgcagcgccactggttggctgccctggcgctgagggctggggtgtatccgactcgggagtttctggctcggggtaaggaaaagtcaggagcagcttgcagacgctgcccggccaggttggaatcatgttcacacatacttgggcaatgtccgttcgttcaggcgaacagaattgcgaggcacaacaaggtgtgtgtgctcttggccacggaggcggagaggttcggctggacggtaataagggagttccgtcttgaggacgccgctggcggtctcaagatacccgacctggtttgcaagaaggccgacacagttctcattgtcgacgtgaccgtccggtacgagatggatggagagacgctaaaaagggccgcatcggagaaggtgaaacactatctcccagtagggcaacagataacggacaaggtcggagggcgttgctttaaagtcatggggttccctgtaggtgctaggggaaagtggccggcgagcaacaacacagttttggctgagttaggcgtccctgcaggtcggatgaggacctttgccaggctggtgagccggaggactcttctttattctttggatatattgagggacttcatgcgtgagccggccggcaggggaactcgggttgctctcatccctgcggcaacgggtgccgcgaattgagggggacagctgggagtctcggcatgattacaaatcttgcgctgcactcggatgtcgtccccgtgacggacacattaatccggaaagcgagtggtgactcgcctcaag

SEQ ID NO: 1027 - DNA, 4495 bp, Limulus polyphemus
  source 1..4495: mol_type = unassigned DNA
tgggaggagacccaaactatcctaggatggggcggaaccgaccatatgagccatattaacattgcccacactatcctctggaggtacctcctcgtggtacggctggatataggtaaatcctgtaaccaaatcctccaacccgtgaaggagaacactaaaacccatatagtggcctcgccaaccactatatgtccaacggcaggagaagctatctcccggatgggaaggaaaaccctaaaccgtgatgggaacttaccggccccatcagctattgggtacccggtagggacttgcaaccctaccctgtatttgcattttatagggaaccggtcggccctatatcagagtagaccgtttattaaatatgggtgaaaatattaacagtaaaagctatggtttggcgtccgtgtggtgccagggcggcggccaaacccgagctacttggcaccaactggggatggtagcttccgagcgattccctggcgacgtgggaccgatcgacgatggagtccaaacatccggaatagaggaattgagaaatacctattccaccaccggctcacatacccaaggtgaacccggtgcaactagagtacaacctatctgtggcggtaggtgccgaaccactcaggtgacgggcttgtttattgatgtctccctacgagacacgaattgtgacaaatccactccggtggacaattacccgatctatgaacctgttaccgatattagacaagaaaataaagaactgacaacgcctagagcttcaggcagcatgtctgtaagtatccagtcatcgagcgtgactgagggcgaaattgataataactctgaaactgaggaattgacggatatatgtttggctacgctagagcttcaggcagcacgtctgtaagcatccagtcatcgagcatgactgagggcgaaactaacgaaagggccacgcctagagcttcagacagctcgtctgtaagcatccagtcatcgtgcgtgactgagggtgaatgtctacctcctacagacaactgcaacccgtctgtagagaaccagttaccgtgcgtaactgagggtaggtttgaacgggtaggctcactggtgacggtgcgtctgcccttcagaaaggtggcatgtgacttgtgttctaaagagttcttgacatattcgaagtttgcagtccaccaggcaaacttccacaattcagaaactcaggcatgctgcacatattgcggtaaaagtgatggcaatcatcactctatagcctgtcacgttccgaaatgtccctggcggcgaactgttacgtttgctgcgaacttaagcaatttcttgtgtgatctttgcaatgatagttttaagaccaaatcagggctttcgcaacataagcgtcataagcatccttgttcaaggaatgctgaacgcatcctttctcttggagtcaggacgccgtcggcccgccctcgccaggtagtgtggtccgaagaagaaacacgaaccctccgggaagtggaagtagtgtattcgggccaaaagaacattaatgtcctctgtgcggggcatctacctggtaagacttccaaacaggtctcggacaagcgccgagacttgcacaggatacggtcttctaacgtacatggtacacccaccactcagagtcgtggagatcctgttgaacaggtcgaggagtacgaggagttggactgggaaggaatgcatccttttcccgaccctgactctaagttttgctcgtaccttgatcagctgagagatcagaagggactcactgaaccggtatggcaggagatcgaaatcgtggcacaagaatgggtagaaaaccttgcccatgttcaatcgtcttggaatcatgagagaacaaccaagcaggtgccagaaaacaatacacctgcacgaagaccatttaaaaggcgtctccatcgtgtggaacgttataagcggtttcagagaatgtacgacctccagcgaaagcgcctggctgaggaaatactagacggccgggaagccgtcacatgtaacctcaaaaaggaggagatcaaagaccactatgatcaggtctacggtgtgtcaaatgatagagtttctctagatgactgccccaggccaccaggggccaataacaccgacctcctgaaaccgtttacgccaaccgaagtgatggactcacttcagggtatgaagaacggggcgcctggccctgataagattaccctaccgttcctccaaaaacgtcttaaaaatggcatccatgtttccttggcaaatgtgtttaacctttggcaattctcgggtcgcatccccgaatgcatgaagtcaaataggtcagtcctcatcccgaaagggaagagcaatctgcgggatgtcagaaactggcggccaatcacaatctcctcgattgtgttgcggctatacaccaggatcttggcacgccgtctcgagcgggcggtgcagattaatccccgacagcgaggcttcgtccctcaggctgggtgtagggataatatattcctgcttcagtctgctatgaggagggctaagcgaaagggaactctggctctggggcttcttgacttgtcgaaggcatttgacacagttggtcacaaacatcttctgaccagcctagaaaggttcgctgtccacccgcatttcgtccgaattgtggaggacatgtacagtggttgttcgacgtcctttcgagtaggcagccagtctactcgccccatcgttctgatgagaggcgtcaaacaaggggaccccatgtctcctatattgttcaacatcgctctggaccctcttcttcgtcaactggaagaggaaagccgaggctttatgtttagggaggggcaggcccctgtctcatctctagcatatgccgatgatatggcactactggctaaagatcacgccagtcttcagtcgatgttgggcactgtggataaattttgttcagggaacggacttggccttaacatcgccaaaagtgccggacttctgattaggggagcgaataagaccttcactgtcaatgactgcccttcctggctagtaaatggtgaaacgctcccgatgatcggtcccgaacaaacttaccgttatcttggggcaagcatctgtccgtggactgggataaacagcgggcctgttaaacccaccctggagaaatggatagccaatatcacagagtctcccctcaagccacatcagagggtcgacatactctgtaagtacgctttaccccggctgttttaccaacttgagctgggcactctgaatttcaaagaactgaaggaactagacagcatggtcaaacaagctgtcaaacgttggtgccatctacctgcctgtacggctgacggcctgctatactcccgtcatcgtgatgggggtttagctgtagtaaaattagagtctcttgtcccttgtctaaagatcaagacaaatctcagactagtgcattcgaccgaccccgtcatatcatctttggcggaatccgatggtttagtgggtgccatcgagggtattgctcaaaaggctgggcttccgatccctacgcctgaccagcgatctggaacatatcattctaattggagagatatggaaaggagaagctgggaaaggttggccctgcacgggcaaggtgtggagctcttcaaaggctcaagatctgccaaccactggttgcctaggccagttggtatgaagccacaccactgggtgaagtgtctggcaatgagagctaatgtataccctacaaaaagaggcctcagtagagggaatctatctaagaacaaagattccgccaagtgtcggggatgcacatcaatgagggagaccctatgtcatctaagtggtcaatgcccgaaattgaagtcgatgagaataaggcgccacaataagatctgtgagcacttgatcgccgaggccagctttaaaggctggaaggttctgcaagagcctaccttggttacagacaatggtgaacgtcggcgacctgatctgatcttccatcgtgatgataaagcggtggttgttgacgtgacggttcgctacgaaatttcgaaagacacgttgagagaagcttatgcttctaaagttcgaaggtatggatgtttgaccgaacaaattaaagaccttacaggggctacctccgttgtttttcatggatttccaatgggtgcccgcggtgcctggtttcctgaaagctcggacgtgatggccgacctgaacattcggtcaaaatattttgaagagttcttgtgtagacgcaccatcctatatacactggacttattatggaaatcgaataacgaacaatatttagaaaggcttgcaccataaattttgtctctttccccaatgatgtctactagcacgctgccgaagctagatagattgaggaatctgcgtaatctgtaatgattacgcctcatgggcatctatcggtagcgtcgaccctgacgttaaattgggtaataagaaatatcga

SEQ ID NO: 1028 - DNA, 7028 bp, Caenorhabditis elegans
  source 1..7028: mol_type = unassigned DNA
gctcactttctatcgtgttaaccgtacgtttacactcccagtgagtgtaataaaggttattcgatagagggtgtctccctctttcttgggtaattcttcggcggtccggggtctctccctcgtcttttttttaaacttttctttctcatccactcttttgctcctttttactaactcttgtactctatagtcttttctcatcccccatccgccgttgggcaaagtttatttactttgttaaatccatattttatctctctcacccgtacagaaagcgtctccttctcaaacgcttttctgtactttttcttatattttcattaacatatttttcctgtttatactaacctaacctccattgtcaattactaactaacttgtacaacggatttcgatgttgcgccgaaaaggacgtcaccgaatggttatggtcaattctgtcaaatggcaacccagtgcacatgctgaagcaattggaacaggaaagtcctgggcaccacagcggtcccaggcatccgaacacggctggcaatcaaatgcaatgtttgatccccccaacaggattctcttcgccagagactcatggtcgctcaaccaatcaacgcatcttcaaaatcaaaggagcggatcaggattgggtataagacctggtcaggtaaggaacaatatggtggggggtgggcctcacagagcaggggacccaaagcgtcgtgtcgagctggtcagcatacaaggaagcgaagtgaccgtcagaacaatctacccgtcggatgaaatattcagttgttactccaaatcatgtgatatcaaaacaaaagctggctatggccctgaggacctaaagcacctgactcgtcatatcaagaacgagcatggtctcaaagctcgctgggcatatcaatgtggattgtgcaatgagaagtcggacccaagtgtatcggaaggccacaaatggatggaggcacacatggtcgccgttcaccaaagctctgcggaaaaaaggataaagtcctatcagaaatgcacgggtgcaagagttgcagaacagctacaagctgctgctccatcgcttactgtgccggggaagcacaaatcaggctctagagacgctgccaaagattcgatgacaccaacaaaggatgatgacccgaaaaccaggatctatcagacacgaagcgtagttaaaaagtcgactcagaaaacagcagagccaacagatgaagggtctagaggcccaaagtacgcatccatttttcagaaatccgtcaaagcaaggaagagcttggcgcttctctgtgaattaagcagccctaagcctatgaacccccttcctacaaatgagctaactctgaaagaagggaattcaagagagctcgccaaagaggaagcaccatctgaaggtatagacgacatcgtcatcatcgatctggacgaatcggaggagtcgccacccagaaggaaacgattcaacacctggtgtctggatcatgagtcaagccgtgaagcatggctggatgacacagcaatcttctggtacatctcctatctctgcagaggaagtacaaagtactcagctttggacccatgcctctggagtatgtacaaagtcaaaggctcaagatacattcttgaccgcttggaaagctccatcacatattttttcccgatatgcgaggaggaccattggacactgttggtattgaaagacaattcatactattatgcaaacagtctgcaccaagagccacgtggcccggtcagggacttcatcaacgactcaaaacgggctcggaaggagtttaaggtgcaagtacctcttcaaagagactcctttaactgtggagtgcacatctgtctaatgaccaactcgattatggcaggaggcaaatggcactctgaagaagacgtcagaaacttcagaaaaagactgaagaagacactccaggaagaaggctatgagctttactcggtcaatagtctgggtataccattccaagccccaacgactgagcaaatggactacaaagaaacaagatgcaaaagaagctatgccagtgttcttactcaaataagcccgccggccaaaaggccggactgcaaacctgacaacaacatattcgtaccaaccaaggattgtgctgccgaaggtaacccgcaggaaaaaggccgaaatgaatctcctgaagagatcaatacggaacatatcgtcgtcgcaggaaaacctgcaaacaacatcagtccaaggtgtcggagcacctcggaaatgctgtttgagatggtgaaagccacaaccagcagtggaagaagcagcttgggcaccatgacgcaggatgagttcatccgaaccagcacaatcgccgaggcagttcccctaatgagcataaaactcccaccaatggagttgccaaggaaaattctgccaccaattccccccagaaaaccaacccaaaccaatggaggtcaaaagggaaagcaacagagggtgcctacaggaaaaccagacaccctaaatgctaaagtccggaactggttcaacaaccaacttgagtcgtatgcgatggagggtcgcagcttccaacgactggaatggctgacggaagtactcactgcgtcgatacaaaaagcagcagcaggtgatgaaggaatagttgatattatttgcaaacggaacccgccacttgaagttgcgaagggtgaaatgtgcacccagaccgaaaacaaaaggaaaacgaccaacaatgcagcaagaattgcggacccaatccagagcagcaagggagctggtgatgtgaaggcatcgtactggaaagaaagggctcgcacttacaacaggattattggtagcaaggaggaactctgcaaaattcccatcgatcaactggaggatttcttcaagaaatccacgtcccgcaccaacgtgcaggagtcgatcatgaaggagaaaagctccaaaattcctgctctcaagataggtaactggatggagaagaagtttatcggaaaggaggtggcgttcgctctgcggaaaacaaaagacaccgcgcagggtgcagacggactgcgataccaccaccttcaatggtttgatcccagtggtgagttattggcgaaggtatataacgagtgccaacgacacaggaagatcccaaaacactggaaggaggccgagaccatcttgctgttcaaaaatggagatcagtcaaaaccagaaaactggcgcccaattagcctgatgcctgtgatctacaaactttactccagtctgtggaaccggagaattagagctgtaccaaatgtgttgagcaaatgtcagcgagggttccaggagcgcgaaggttgcaatgagagtctagcaatactcagaacagcaatcgacgtggccaaaggaaaacgaagaaacctggcggtggcatggctggatctgacgaacgcgtttggatccatcccgcacgaattgattgagtacgcgctgacagcgtatggatttccgcaaatggtcgtcgatgtggtcaaagatatgtaccagggagcatcaatgagggttaagaacgcgacggaaaaaagcgatcgaatcccaataatgtctggggtgaaacaaggcgatcccatttcaccaacacttttcaatatatgcctggaaactgtgattagaagacacctggagtctgcaaatggtcaccagtgcctcaaaacaagaattaaggtactggcgttcgccgacgacatggcgattttaacggattcccccgaccagctccagcgagaactgtcaaagctagacaatgattgcacgcccctgaatcttattttcaagccagcaaaatgtgcatcacttgtgatccaaaaaggagttgtgcggagcgcatcaattaagcttaaaggaaacgccattcgatgccttgacgagaacaccacttacaaatatttgggagttcagacgggttcggcagcaagaatttcagcaatggatctactggagaaagtcacgaaggaacttgaatgcgtggtcaaaagtgacctgacgccgccgcaaaagctggactgtcttaaaacattcacgctgtccaaactgacatacatgtatggaaattccataccactgatcacggagataaaaatgtttgcaaatatcgtcattcgaggagtcaaagtgatgcatagaatcccagtccgagggtcaccactggagtacatccatcttccagtgaaggatggagggcttggtgtagcatgtcccaagacaacctgcatgattacgttccttgtctctactcttaaaaaactctggtcagatgatgaatacatcaaaacattattcacatcactggcggaagaagtagtaaagaaagagtcaaagaagagcacagtcactatggatgatatagccgactatctcaacgttgaggagaggatcaataggagcgaatttgggtacaattccattacgagactgcgggatgtgatgaggaacttggccatcactggcgactccccactttacaggctgaaaatggtagtaaagaacgggaaaatcgctttgctcgtccaagccacaagcgaaagcatggaaaggatctacacggaagaagatgcgaaaaagctgcagcgctcactgaaggatcaagtgaacaaagcactcaaacatcgattcaacaccaccaaagtagtgaaaagcaaagtcgtccgagtcgtgcaacagcacccagcaagcaacaggtttgtcacaaaaggtggcaacctgagccttgcatgtcaccgctttgtgcataaagcacgtctgaatctactggcctgcaactacaacaactacgacaaatccaaatcaaaagtctgtaggcgttgtgggaaggatctggagacgcagtggcacatactgcaaaactgtccgtttggtttctcaaagaagatcactgagaggcatgatgccgtcttgcacaaggtcaaaactctcattgaaagcggtggaaaaaagaattggacaatgaagattgatgaagaacttccaggattcagcagactccgtccagatatctgcctcaaaagccctgatgaaaaacaaatcatcttggcagatgtcgcatgcccatatgagcatggagtagaagcgatggaaaggagctggcaggcaaaaatcgacaaatacgagacgggattcgcccacctgcggaaatcgggaaccaagctgaccgtccttccgattataatcgggtcacttggatcatggtggaaaccgacaggtgacagtctcaaggaattgggaatcaagggaagcgtgatcaacagtgccattccagaactctgtgctactgttctcgaacacagtaagaatacgtactggaatcacatcttcggtgaagcgtacataccaaatccaatgcgaaacggacacgcaaaacctgctggaaatggatggaaaaaggaaagattgcagaaggcccctgtgaggcctaccaactagcctccagggcacgccgcacgccaaaagtcctggcataactctgcaaataacatcaaacgtcaatcaactccacaaactctccactctcttcaagtcttctcggtgcttccaacaccacaatggtgaaagctccttcaccttttccctccaaaattcttcccatgtggggaagtcctgttcttgtaagctctccggaggctgcaagagcagaagaaattcttctttctgacaaggtcagaaggaagtcctgttcttgaggcgtccatcccgggcgtcataggagagatcagatgcaccttctagcaggagctagaagggctgccctgtcttgagatccccacgggggtcaatagacgggaggggctgctggctttctctttttaagaggaagcaccaatccggagatccttaggggtcaaaggattaaaaggcagcaggtccaattctcctcactgacttcggtcagagaggagtcccgccttggagacctccccggggaggttgctgaagaggcggaagctccttctagcaagagctagagggagttcccagtcctgaaacccttgcggttgatgatggaatggaagagtacttcggtactgctcgttgctctctctgcgttttactgccgagggccggatttgctcgaatcgcgaaaggtctcaatcgaccattcaagatgacggcttatctaaggtccgaaagcagttgggagagtaacgtgttctcctacctttcaagttgaatggtcgttttactgtttgggatagctgacttgatgctagtacgcttcatctgtggatgacgctccccaagcagtcaagtagacttgaaaggtgccctcgccctagttagctcttagaccttatgggtcgccatggttgtggacgggtatgcttgccggagccgagtcgtgtttcttagaaccaacctcgacgaggcgaaagcttgcacaagttagcacaattgtggtagggccgactagaaaatgagtcccttagggggttacgccttggcgaaagtgaggacaattggcattgacgggtgcttcggcactaggcaaaggcgccaccacactgtccaatctctaaaaagttcacattcatcgaagaactaccggaaccaaccacacatgtgttgaaacctacacggtggaagggaaaggaaagcttcgctggaacgaaaagaacggataggttccccttcttgatggctgtgaggcttaggatggacgggaaggccgtgaggcctcaggcgggtaactcggccagacgctagttgatcttcggatcacgacagccctggctaagaggaaccctggatggagtgtgaaggatgggcgggtagggggttaagcctgttgacagaccaccgactgcagtcacaaaatcagtgattatgcgggtggaccaatctgttggcgggtgtttccctctacctgaccccgcaatatggtatgtacgatcctcggatctaaaattcataatggcccaccacaaccataaacctccctagcagctggtggtcccgataattcgggttcttgccactactgcgacccaggctcgcc

SEQ ID NO: 1029 - DNA, 3376 bp, Cryptococcus neoformans
  source 1..3376: mol_type = unassigned DNA
ccctcttaataccccataacacataacaaccccctaatcaacgttctctgcaccttaaacaccaccaacatgtccctgcagagggccaaaaacgcccgtggagatcctggtcggtgcaacctatgctctgccgactatagggacctcaaagatcatctcaataaacaacattccacccatttcttcgtcccctccgacctccgtggctcttccctagtcgcttgccctcgctgcggcaccccctgctcagctggcactggtttatctcgtcaccagagccggtattgcggtctcaccgctcctcgaatccgccgaaatcgcgtgggaaactcaacaaacacatctcgctgccctccctccaatactgcagcttcacccatcgttccttcgccttccccagaacgcccaagcccccctcagcctgctgaagttgttgccagtctcgaaccattgtctgaagccgaggaggtgctggaggtcgcccaggttgatgccgagactgttgacacgctggaagggacccggagagctccggaatccgttccgagatctgccgaggaaggtagcacgcgagttagggagctaaacatgacagcgccggaggaggagcatcgtggggaggaggagagtagtcataccaacccaactgccccagcagggctcgagaacgcggtgagctcaacgctggggccttcccctgggacgttgccttccttacttccgtcccaagagtgtgctaacgaaagattcctgtaccttgcgcacctgcctgttcggagcaagcctctgcccaacaacctagttaccgacttcatggacgccgctgagcgttgtgctcttgcctacattgcacaaccctcggactctacactgctggcatttctcgcccttccaaaggtcggcctcacccaggcgctcgctccagaacagcccctcaggccgtcaaccttccttaagcagttcccgcatatcccctggccagaacagccacccgctcgtcgtcctcccagcaatattcgtccagacaccaccaaacaagtcatcaaactcgttgagaatgggcgcctaggtgcggcagagagggtgttggaggaggatgcttcagtagccgaactcgatcaaggggtcatcgaccagctcatcaccaagcaccccaaagggccgtcttgtccattcggcaatgcagtgggtccaactcctggtaaagctcccgacatcgacaccatccaaaaggccctcgactccttcaagcccgacacagcacccggcgttagtggctggtcagtccctctcttgaagacggctgccaagagggagccggtcaagcagtttctccaactcctctgcgccgccatcgccaacaacaccgcccctggtcgctctatgctccgcacttctcgtctcatccccttgaagaaggacgatggctctatccgacctatcgctgttggtgaacttatctatcggctgtgtgcgaaagctctcatcatctcgcatttccaacccgacttcctcctcccgttccagctcggggtcaagtcaatcggtggtgtagagccgatcgtgaggctgacagagagagtcttggagggttctgccggcgctgagttctcctttttagcctcgctcgatgcttctaacgctttcaaccgtgtagatagggccgagatggcagcagcggtcaagacccatgcgccgacgctttggaggacatgcaaatgggcctatggcgactcgtccgaccttgtgtgtggtgacaaaatccttcaatcctctcaaggtgttcgacagggtgacccctttggccctctcttcttctcgatcaccctccgaccaaccttgaatgccctcagtcaatcgctaggtccgtctacgcaagcactcgcttacctcgatgacatctacctcttctcaaacgactcgcaagtcctcagcaaaactacccaattcctcgccgacaagcagcacatcatcaagctcaatgaaaagaaatgcaagttaatcagcttcgatgagatcaggcaggagggcttcaagatgctagggacgatggtaggaggtaaggagaagcgagcggagtttctggaaggcaggattcggaaggaaatggcaaaggtgggcaagctcaaggatcttccacatcaacacgcgctccttctattacgtttctgcattcagcaaaatctacgacacctgcagagaagtctgcgctcggacgaccttgtagacctatgggagaggctggacacgatgctatgggaggaggtgaaaaggatgaggatgaggcagcgggaggatacggcggaagaggaggctctagggagatcgttgacgaagctaccagcgcgactgggcggactaggtctactttccttcaaagatgtagccccccttgcttaccgctcggcagccgaggcctccgacactctcctcgataacctaggtctcctttcttcgccagaggaacctccaactccgatcccccaacgaactcgatgcgcagaactctgggaatcgcaacaggaagccatcctacataacctcggcgacactgaacgcaagcgactcaccgagaatgcctccagactcggccgaagttggttatcagttatcccttaccttcaacccctgcgcctttccaatgtcgagattgcctctggtctccatgaccgcaccctggtcggctcctcgatccctgtctgtcgcttctgtgggtcggactcacctttgggtcacgacgagctttgccgcgcccgcaacccctggacccagcgccggcacaatgccatcaaccgcgtcatttatcaacacctcaaacaaattcaaggtgccacggttgagattgagccccacacgctgtcgggacaaaggagaaacgaccttcgggtcagaggttccagcgctctggccttcactgactacgacctgaaggtttactccctcggggaccgagacgcgagaagcaccgtcacaccctgcgcccccaacggcaagctggccgacttctgcttggaccggtgcgtgaactggctcgacaaggtgggtcaggtcgtctctaagaacgctccgaaggtcactggtggggtctttaaaccaatcatcctttccactggtggcttgatgagcaggagcacagcagacgaatggaaggactggagggacgcgatgccggtgggggggttcgagaaaatggagaaacggattggtgtcgagttagtaaaggcaagggcgaggacgctggtcttatgaggaagaggaggttggattattttttcttttctttaataagttgtttatttaagtagtttctttcattcgggcaacccacacgacaacccaataaattaaacaacgaaaaatgcaacctctataaccc

SEQ ID NO: 1030 - DNA, 3234 bp, Chondrus crispus
  source 1..3234: mol_type = unassigned DNA
acgccccctatccatttctgccagcctcccatcggctcgccgtctccgcaacccctcttcctcggctgtaccagttccgctcccacaacctccctcgccacaatgagtcaacctaatatttcgtccgctgagacccccttgtctcagctgcccacgcctgttcccaccccgccttctccctccaatccctctctctctctccctactgtgcgtgacctcctcctctgccccatacgctcctcccatgtttactcatccatcccttcctcgtgcttacacagtttcacgatgctcctcatcaagactgtccgcgctgcgtcggccacaatgaccccaactgaatcmcatcgcgcattcattcatctacacattcttcccatcgctgtcttgcgacgctcgttccgtggagaaaccggatggcgttcccgcacagggcaacatcatgccctccgccaacggattcgccgcgcctcctcgggtcggcattgggctgccttgtggcacgaagcccttgctgcacatcaggtcgaccttgactaccgcacgcgtcacagccgtcgttaccaagcctccgctacatcgcgccaccgcatcggccgtgccatgcgtctggccgccgatgcccaatatggacgtgcaatgtcggccctcaaggccaaaccgctgcccgatctacatgctgccgccacccgcgacacactcaccgcgcttcaccctcctcctgccagcccggttcagcctctctcaccgactgacctccccccggtccctgaaattacggaaggtcaagtcctccgagcggcacgcgcccttaatcccacatccgctgcaggaccggaccatctctctccccgtatcctgcagctcttagcccgcaccactatcagcccggaagctggggttacggggttgtccgcattgacgaacctggttcgacgtctcgcccgaggtgacattccggatagaactgcgcctctccttgctgctgccactctgatccccctccaaccccgccctcacaaaatacggccgattgctgtagggcaggctttgcgccgtctggtcacgaaggtccttctgccccccgccatccaggacacccgcgatcaccttctcccagaacagctcgccaactcggttgcctcgggcatggacgcaatcgtccatgacacgcgcatgcttatgcatcgtcacggtcgaaacccagactacatcatggtctccgtagacgcgcggaatgcctttaacaccttctcacgtcagtccctgctggatcgtctccctctgcagactccttccctcgcccgttttctcaatctaatctatggccgcaccgttcctgatctcgtgctgccctcttctccgcggtttctgatgaaaagtcaggagggcacccaacagggggacccggcaagtatgctcttattttcgctggcaatccagccgctcctgcgtcgtctcacccgcgagtgccgtctcgacctgaaccgctggtacgcggatgacggcactctggtcgggccaatctcggaggtcatcaaggcactccgaattcttcgtgatgacggcccgcagtccggatttcacgtcaatatcaacaagtgccgggcatactggccgaccgtaatgccagaaaagttgtccgaattgctccgtatcttcccccttcacgtcgagtgcggcgaaggcggtgtcgccttgctgggtgccccgctcggcacagatgcctttgtgcgccgacatctcatgaacaaggttcaatcatgccatgcctccctcagcctccttgatgaaattcccgacgcgcgtacgcggtttcaccttcaccgtgtaacaggctcggtatgcaaagtcgagcatgtttttcgccttacacctccccacctctccctcccagcagctacaaaatttgatgaacaacaaatcgctgcttattctcggttgaatgatgtggccgtttccacatccatggctacacaaataggccttccgtttcgcctcggtggacacggcttcaccccactgtcaccattcatccatgcgtcctacgctgccagtttaattgaggcggcacctgttcgtgtgaagggcccacataacccctccgagtcgttttatcgccgcatggcccgtcgtcatatcgtccacgtactaggggccttgaaccctgaggtccgcacccgaggcattcttgggacccattctcccctcggaccatttgaaccagaggcccttttgtctagacctgaacgcgtacaccacacattaattcaggctatgcagggggccacttctcgactctactgggaacacaccgcgtgggaccttgaccctctccctcgcaaccacagtgccgcctctgtccgccgacgtgcccggtacaattccctccgtgctccgggcgccgcgtcgtttctatgcagccacccctcactcacttctcgagtcccttctgcggtgtggtcctgtatgctacgccggcatctggatacacccgtctactgtgactctattcggcctctcatatgttcgcattgctgtaagccaatggacgctcgcggtgatcatgctgcaatatgccgtcatggcttcggcgtcgttcaccgtcataacactgtacgcaacctactcgcccgtcacgcgttccgcgccgccggtctctgctgcgaccttgaggtcccttctctcttgccgaataccgcgaaccgccccgccgatattctcgtccagcccgccccgcctccttcgggcgctctcccggaccgccccactgcgtacgacgtaaccgttcgttccccctactgtcgctctacaatgtctctcgctgcgaaaggcctcgcgggtgcagcggaagctgctgatttggacaagcttcgcgtccattcccgtacagtgcgtgacgcatttcacctccagcctgactccccactccctctactcgactggcactttgtcccgctcgcatttgatactctcggcgcgaccagctctcgcacgatggcagtccttgagtacctcgctcaccgcattgccaaccggacatattcatcttacgggaccgccaagatacgtctactacaacgcatcagtttcgctgtttggtccagtttggcctctgccaccctttcccgtatgccctatcacggcgcggccctatcgagccccgcccaagtgtaagtccttgacgcctgccccgtgatacagcatcggtacccctagcatttgaataaaaaa

SEQ ID NO: 1031 - DNA, 3732 bp, Chondrus crispus
  source 1..3732: mol_type = unassigned DNA
  misc_difference 2: note = a, c, t, g, unknown or other
cnccagccamcgatcccgccgccactcgcmgcccggccgtctcgaccgccacctccccgasgccccagcccatcatggcctstwmgccccwgatwtctcccccgggggccccccctgctccgctgcggtaccggatgttacaatgtccaccsccgctaccsaagcsmcastmgttkccggtcccccacccgatgtcgtcacccatacgcckccgcctcccmcaccggmcgatgaggggacccccttcccsaacccctccccgagacatgcacagaccscatggcacccccggwccgcactctcaccgatkctgtggccgccctcccmaccactgcacccatgcctccscacaaccscgsmsagcccmgcacsctctccaawggccgaaactscgcagcccacctccacatccgcatgtttcacccctcatcctctgcastggccccctcccaacgcccatgacccaaccacgcatgaaacgagcgctctccasaagcgccaaggcgccccctaccaagcgcccctctgcctctcagggcccagccgcgtcttcccatgackaatgaccscggacgcccccacctcmacccccgcgcccgcctccctacaggttccctcccccwactctcgaccagcacttmttcgccctctcwtmagcctacccccacccgmctcccmggcgcccaccctcmccttkccgtcsgttgaggcactcctttcctccccgattcggccstcagacattttcttccattccgggaccgcgccttcatagcactgtattacttctcatccgcctcgtccgcgccgctacagccgccaacactcccgaaaccaccacactgmattcttgcaccttcacctgctcccgactgccsttcttcgagaggccttccgkggcgagsctggctggaggtcctcgcgcggtcaacttcatgctctccgcttgckgatacggagagcgtgtackggacgagagtggggwctcttatgkaawgaagcmctagatgcccacagckccaggacagaatggcagcacacgcatgcccggcgcccctcgccacccgtttccccatcggcacgtgccgcccgcgctatgcgccttgcctcccaagctcaatacggccgcgccatgcgcacatttaccaacccccctctagctgacctcaacgacccggccacgatggagcggctccaagcccttcaccccactcctaccgtgcccgtcgtgcccctgccaccctccgcacagcctcgaccacccgaagtcaccgmggaggcggtcwtgcgtgcggttcgtcgcctcaatccgaactcggcggccggccctgatcgcatgtccccgaaattgcttcacctcctggctcacactcccataagcccagaagcgggcgtcaccggtctctckgcgctaaccaacctcgtcagccgcctggctcgcggctccctcccaccctgtacgatcccactggccagtgcggcgacacttctkccgttgcagccccgaccgggaaaaatacgcccgatcgctattgggcaagccctwcgccggcttgtcacaaaaktmcttcttcctgccgccatcgacgactgtcgggaccaccttgctcccgaacaamtggcmaacggcataccmaacggcattgacgctatcgtacacgacgcacgcatgctagtacgacgccacggtaacgacccacactacktaatggtgtctattgacgcttccaatgcgttcaataatttctcacgscaacaagtcctcgaccagctgcccactcgagcaccatcgctctcacgatatttggatatggtgtacgcacgcgccccctcccccctcgtcttgccttcatscccgcctaccatactccacagccgggamggatcacaacaaggggaccctgcaagcatgctccttttctcgcttgccctccagccgctcacgcgcctcatttcacgtgagtgtgamctwktaatgaaccgctggtatgcggacgacggaactatcattggacggattgacgaagttkccaaagcccttgatatcatcactaaagaggggcccaggttccaattcttcctcaacccttcgaagacacgcgtcttctggccaagcaggcagcmagacctcctcagcccgctcatgacagtgggtcctctgcgmgtcatcgatgaaggcggtgtggmtctgctcggcgcccccatmgggtcaccaagctwtatggcacagtacattcgggaaaawttgaacacttgcaaaaccgcmctcgcccatctcgaccatatccccgaggcccgcatgcgctttcacctgcatcgggtgtctgcttctgcatgccgcttgcagcacctcttccggttggtccccccggatttcgcgwtgccgtttgcacaacaattcgaccgtgaccaactcgmagcctatgmgcgctttaatagtgtgactatgtcgccaagaatcgtgcccaaatacggctgcstttttcmcacggwggccacggcctcacctcattggcatctaccatacacgcctcwtacgctgctagcctcatcgataccgctccagcacggctacaaggtccccactttcccgccgtctctcagtatcagcgttttgcacgaggcccgttgcgggtcgttcttcgaaatttaccttcattcgtkcaacccgcacacttctcgatgacggaawcggacctcggmtgccttgaaccakctgcgctactggcgcgacctgaacgcatacacacctttctacttcaggcgcaatacagtgcagcagcwagctcgtactggcaaawacccctctgggagtccttccccaaccctggtgatcacagcgcagcctcgctacgcaaacgagtacgctacaactccctgcttgccccwggggccaccagttttctcactgcacacccsgccgccacctctcgggtccacaacgcaacttggtccacgatgttacgtcggcacctcgacgcccccgtgaccaacgattccatatcgccgttgcgatgtkctcactgctccaagcctatggatgcccgcggcgaccacgcgwccattkgcagccacgggtttggtacgttgcaccggcataacaccgtcaggaacgtcctcgccmggcagttattccgmgtcgctggcctcgcctactcgctcgaagtaccctttctgattcccaacaccgccgcccgtcccgcagatattctcgtccaaccacctcctccagcccctggcctacctcctgacmaacccacagcctatgatgtcacgatttgtagcccttttcgccgcggaatgttataccatgccgcccgtcaccgcggcggagccgccgacgccgcatctgtaaggaagmgcaaagccctcgagcgcactatccgcmacgctctccttatcgaggacgacaatcstccgccgcctcttgactggcactttcaaccgctttccttcgacgcwctgggmgccccctctcagtctactgtacacgttatcgaagatcacgctaagctcatggccctccgcaactcgtgcacmattgcaactgccaaatcacgcatccaacaacgcctcagctttgctatatggtccagtgctgccgccgctatcctctctcgcctaccgacacacgccgcggacatctcatacccgatagaagtataattcaccttcatatctgctagtgtctctgtaagcgcacccctcatgcattgataaaattacccccca

SEQ ID NO: 1032 - DNA, 5481 bp, Acanthamoeba castellanii
  source 1..5481: mol_type = unassigned DNA
taaccctaaccctctccctcggcccctctaccctaaagcgccctaatcgaccggcgacgccctaatcgctaccctctacgccctaatcgactttggcgccaaagcgactttccccggccgattttcttcctgcctttttcttttctctccaagcgacgcgccttttactttgccgccgttctgttttttcttttctctttgcacttcgcttctacttcacacctcctcctcctccttctcgacccgcgcggcctcgagcgacttgctgcagcggctcccggcctcccccacgcggcctgctactcccgctttctagacgcccccggtcttgctctcagtctcccgcatcgaagcggtagtcggggtacgtgctcaagtgactcaagcctcttttcagcctcggcgctctctcaatccgcctcagtcttagcctttcaagttgctcgattacgctctcgaatcgctctctctctcagtctcagtctcagtctcaatctcgatcttgccttcgccttcgtctcgacgccttgctctcgwaatcgctgccactacgtgccagctttttcgtgccttgtcttcgtgtcgacccggaccgtttgcaagccctcgccttcgtaccccgctctcgtagccgttctcatcgctgaagcgttctacgcgctggcagcaagcctcggccctagcttgtagcgccgccggtggccgctcgccaacatggctacgacgaccatctcacgatccccttcgtcttcttcttcttcttcttccgctcgctcgcgggcgtcagcttccacgtccgcctcagttgcgtcgataccccgcctcttccgcgatggccgcttccactgccctctcgcccactgtcagacccgcacgtccacatggcaggacctctccgcgcacctcacacgcatgcacgacggtgacgtgccccgtgacgtcgccgccgcctgcggcatcgtgcagtgcctacacgagggctgccgcaagtggtttcgcggagctgcaggacttgcctctcataggggcaaggcccgtcacgccccgccaccagccccccgcgccgccctcgccgtcgccgccgtgccccgcgcggattctcgcggtaggaccccagccccgaccccctcggtagccccgcccwacgccggtcctccgccgcgagctgcgccacgcgccgcccccagcccactgccgtgcccgcctgcgctcccgcacccgcccccctctgcctctcctcccacctccagcgtgacgtccccgtgctccccgcccacgaccccgccgtcgcagccttcgcccgacctgttctcgggtttcgcgaacgcgcctaccacgccatcgccgccctccacgccgwcwtcgtcgccagcaggctcgcccatcccggctgccagacgcttcgtcctgcctgtggccacgccctacccggcccccgcgccgcgtgctaacaggcccaagctgtcgccggtcgcgcgccccttcgtccctaaggcgcgagccggagcgatacctgaggcgtcctcacctgtgacgcctcaggaccgcgccgtctcacgccgcgaagacgccgccgccgccccttcgtccgcgccgggcctcggcctagcagacgaacacgaggacgatgacacgtacggcggtgacacaatcgcgctcactgccccccacgcgccccgtgagacccgcgcccccttcgagttcgaggcgtgtttcctcgaggaggaagccccagccaccgccggcgacctcccgccttacgcgcgcgccttcctcgcttgcccgtcagcccgtctccaggagatcccgcgccgcctcaagtccgcgtggcaggccgccgccaagaccatcgcggaagccgcgctggattgccacaccgcgggcgacacgcagggctacaacgcccacttgcggctcttcatcgagctgccggcccgcgggctggcagtgcccaccaactgtcgaggcgccgcccgcaccaagcttcaacgagagcgcctgctcgacatcgccgccggaaggatcccggccatcccggacccgccgtgcgacgccccgggcgccgacgacgccctacgcggtttccccgtatcggggacgacagccggcgacgtcagcaacgacgacgacagcggaggtgtgcacgatcggcccgcggccaccgccagcgcccggcaagccaaacggctagtggagcaagggctctcctcccgagccctccgtgcccttgaacggggcgagcccgcggtcgcctcggcagacaccctcgggcgtctcgaggcgctccacccgcctaaccccaccgacagaggactatggcccggcgccccgaaggccgcgatcccgcgggtcaccgccaagcacctggcccaagtggccaaagagctcccgcgcggtagtgcgccgggtccctcgggctggacgttcgagctcgtgcaggcggccatcgaccgccaacccacgggcacggttgccgcgttcctcatcgacatggcgcagagagccctccggggcaccctacactggcggggattgctcaccgccagccgccttgtcgcgctgaagaagcccgacggcggtgtacgacccatcgccgtaggcgaggccctctatcgcgtcatcggccgccttgttctcaaggccgacagggtgatgtcgagcgccgacgccacgcaatatgtcgggcggcaccagtatggcgtggcctaccccggtggggttgaggccccggtccacgccgtccgcgaactgcacgacagcggccagctccgagcggtcgtctcgctcgactggcgtaacgcgttcaactcgctcgaccgcgtgcacacggccctgctcatcgccgaccgcgcacccgctctcgcgcgactctacgagtggtcctaccgtgaggactcagtcctcgtgctgccgcgcgcgttcgaaaaggcggggctgccggcctccctgctctcccaggccggcgtgcgccagggcgacgtcctgggacccctcttcttcgccatcggcgctgccccggtcctcgacgagatcgacgccataccgtacgtgacgccgcgagcgtacctcgacgacatcttcgtcacgataccccacggtgtcacggacgccgcgaccaaggccgccgtcgctgccaccttcgctacggcggaacgcgaaggcgcggccgctggcttgcggctcaaccgctgcaagtcggcggtgtgggccgcggacgcagaagccctccttcccccccacgccgctggcgcgcgggaggacgtcgagagctgcgcaccagtgcgcgagggcctcaaaatcctcggcgcgcccgtgggctcgcccgccttcgtcgccaagtcgctcgacggcatcatcaagcgcgccatcggcacactcgacctcgtcgctgacgccgagctaccgctgcagcacaagctggtgctgctacggcagtgcgtggcccagatacccacgttctgggcccgcgccgtgcccgacgcaggcccggccctcgccgtctgggatacagcgctcctcaggcgcacgggcgcgctggtcggacttgacgtgcgggacgggtccctgcaagccgacatcgcgcgcctgcctgtccgcctgggcggtctcggcctccgttcaatgaaggacacggcgccccgggccttcgtggcctcgatcctgttcgccgccgcgctcgccaacacgcgccgatccgagctcacgtgcagcgccagtacggcccgacgcctcagagccgccctgcccgagctggcacgcaccgacgcgtgcaacgacgaagccgcctggcggcggtccatcgccaggggagtcttccccgacgtggacaagctgggcaccacacaactgcagcgcgtcctccaggggatggcggactccaagtccgcccatcggacccgccgccaagtgcccttcctcttcgccgccgtgttcgaggacgccgccacgccgggatccggtgcctggctggccgccataccctccgacccgaccctcgtcttgccagacgccgaactggccgaagccgtgcgcattaagttgctcacgacgacggccaatgcggccggcgtctgtccggcatgccacaagaccggcatcgacccgtcccacgcgtacacgtgcgtttcgctatcccatttgcgcacagcacgccacgacgtggtcgttcgccgagtcgagctcgcctgcaagaccgagaagccggtccgcgaacacgtgctcgccatcccccccgtcgcgcccaccgacaacaacaacaacggcgacgaggacggcagcccagtcaccaccgccgacgacaacgcagacggccacgcggtcgcgaccaaacgtcgccccgagacccgcgcttcagccagagccgccgccgccgccgccaccgccgccgccgccgccgcaatcatcaacgacaacagcctcctgagcgacgacgacgacgacgacgaccatgacgacaactgccacggagaggaaagaggagagggagaaaggaacgtcacgtgccccggccactacaccgccacacccttcgccgcggacgacacgctcgacaacagcgacgaggacaacgaggacaacgctcacgaagacgatgacgaagacggtaaagatgacaacgacgacgacgtctacaacaactgcaacagcagcagcagcgacggggatgaaggcggtgacgacctggactacgagtacagtgaccagagcgtcactcgaagcgtcgacgccgcgacgggagagagccccaaccccgagcgccctaccacgcccacccgcgcactactacgcgcggacctgtggctacccgccacctccaccgcggtggacgtgatggtcgcggccgcctgccgtcggtcacgcgccaaggccttcgaccgagccgtcagccgcaaggccgcgaaatacggccctgcggtagccgacggctcgatcgccaaggtggtgccgttcgtcgtgtcgccctttggcgtactctcgaggccggccaaggccttcctcaagcgcgccatgggcgacacgacggcggccaaacaggccaaggcgcgtctgcgcctcgccgtggccgccgtccgaggcacggcccgcctctcctacgcctggggcgcctgcgccgccctcatcgtcggcggcaactaagccgcgcgacgaggacggccaggacgaccaggacgacggcgacggcgaccacctagcaccgcacgcgccacgacatattgtcgcgcgctgtacaggcggctaggtcgagcccagccgaccgttctgagcctcagtcggcttgagcccccggcttcccaaggcctaccggggcggctctttttcgccctggtttttgccggcctgttttttctctcccccttttccccccttttccatttgtacttagtttttccttcggccgcggcagcttgttgcccggcatagtgttaatatgtttaaaaaacgtgtaaataaataactgtttaaccctaaccctaaccctaa

SEQ ID NO: 1033 - DNA, 4121 bp, Fragilariopsis cylindrus
  source 1..4121: mol_type = unassigned DNA
atcaatctaatactgaaggcaataccaaactcaacccgaaatcaaaatcgttagaatcaatatacgacccccgctgctgtacatgtccagccggatctcgttgtaaagaagattgcagctgtaaaaaagttggacttctttgttcttcctgtgaagaagttgattgtggctgttcaaattcttttcataataaagaattaatggctccacttccttggaatgctgcgacatcttcaccaccgtcacctgtcccattaactaacgataagaaaaaggattctactctacctactgcaacatcaaaaaatttatccaaaaataataataataaaaataataatactaataggattaataatattaaaaataatgataatacaaatgatggttctaataagataaatttgaaactgcccccggcagctgttaaaatcacaaatccttataagaacaaaaagaagaacaagaagaagaataacgctggaaagtcgaaccccaaaacaaaccaaaatccaaattcaagtccactttcggataatgatgatgatgatactgatagctcaaacatcaccattaatagacgactaaaatttggtactgatgatttagcacctccaaacccaccgtcaaatactaatactattggtactgctactgctgccaccgctgccactgctacaactacggcaaccgcagcgactgctactactgctaccaacactactactactactactactactaataacactactggagacaatcttgcaagtaatattaataataataataataataataatagtggcagtaacaatagcaacaccaataatattaacaataccgatggcaatggtagtaataatcgcccacctccccgtgtttacacagtcgatccacgaagcgaccttcccggtgcagaaatctctgctgcaaataaaatgttagatgaagtatatggagaccatgtccatgacaaccccggctcccatctcagcggacttattagcagctctcaagatcaactctggcagggttactttcgtcgccttatacctcacaaccaatctctctatgactgccctaagggaaaactgggtaaggatataacgaatgaatattcaaacttatttgaggcaatcatgaatggcaagtgtaatatggagaagctactcgtgtttccagtagtggttctacaacggagacacggagtgactaagaatgccgacgttaaacgccgtcttcttagccgactcaccgcttggaaggaaggcaaattcaagtatcttgttgaagacacacatcgagatcttattgccaaacaatccaaagcaagaggagatacaacccccgcgcacagagctaaagtttactcaagtaaactcatgcgtggacatctccaatcagccgtcaactacatcactgaccgcgaaggagggggcatcctttatccttatgacgtcgatgagaaatcaggccatactgtatcaagagtgctacaggataagcatcccagcatgcgtgatcctggtcccacagccatgcctgcctacgagtccgtcccggaacttccaacacttgaaattacagctgatacagttgagatagtcgctggaaagctcagtggtggtgcaggtctgagtggagttgattcaatacaactcaagcacctcctcctccatcacggtcaagcaagccaacgactgcgcaatgtttgtgcaaaatttggtagatggcttgccaacgagcaccccccctgggcctcgtaccgtgccatgctagcaaataggcttattgcgctagacaaaatgcccggaattcgaccagtcggtataggtgatacatggcgtcgtttcttcgccaaacttgttctagcagtctctatgtcttatgctactgactgttgtgggtcagaccagctctgtgccggactaagagccggagttgatggtgccatacatggactatcggctatgtggagggagatggaatctgaggaaaacacaggtttcgtacttattgacgcagacaatgcattcaatgaggtctcacgcatcaacatgttatggacgatccgccacgaatggcctgctggagctcgattcgccttcaactgctatcggcaccacagcctactagtggtacggaatccaggcgggaaacccttcactttcttttctaaagaaggtgtcacacagggcgacccatttgcgatgatagcatatggtgtcgctctcctaccactcatccgcaaactgaaagaattaaatgtattattagttcaatcttggtatgcagatgatgctagcgcagctggcaaatttgatgaaatactacgcctttttcaagatttattacgaatgggacctgattttgggtactttcctaatgcatctaagagtatcctcatcacccatcccgacaatgtggttgcagctcaccacttcttcaacgagacccatggcctaggtttcaagatcagcacaggaagtcgtttcctgggtggtttcattggagataccacaagtcgagatgaatacgtatcaacaaaaatcgccgactggatccacggcaccaaggagctagcagcagtagcaagattgaagtatccacacgcagcttacacaggcattaccaagtgtttgcagcacaagtggagttttactcaacgtgttattcctggcattgatgacctcttccaaccactggaggatgaactcaccaataatttgctccccgccctatttggagaccccccatccactatggatgacaagctcagacttttgaccgctctgccagtcaaacatgctgggcttgctctcccgaatccagttacctcctccgcaaccaactacaagaatagcactcttatgagttctcatcttctgttggctgttcaaggcaagatcaacttcagtttacaggaccacagagatacctgtcaatcctctctctccgcgtcccgagagctccgacaaaccgaaaatgattcttcattgaccaacctccttgcagctctccctccagctgctgcaggtcaaccaagcacaacaagagcaatcaagcgtgctggggaaaccggtctttggcttactactatccctaatcacatcaacggtaacattctcggatgtgacgaatttattgatgctattcgattgagataccaaaaagtgccacacaatctccctgccaaatgtgatggctgtggctctgcatttgatgtagggcacgcgctccaatgcaaatccgggggcctaatcattagacgtcatgatgaactcaatcttgagcttgcatctttagcaaagatggccttgagagaatctgcaatacgtgctgaacctgaaatcaaccccagcgcctctattatggattctcccaccaccatcacagccatcgacacaaacggagaccgaggagatttgttgatcaagggcttttgggacaatggaatggacgctatcatcgatgtcagaataacagacacagatgccaaatcctatcgaacaagagacccaaaaaaagtcctacagtcacaagagaaggagaaaaagaagaaatacctcgatcaatgtctactccaacgtcgagcctttaccccttttgttgtctctgtggacggcctgattggttacgaggccagcaatgtgctaaagcaattatcaaaacgtttagcagataaatggaataagccttattcagttacatgtggaatagtccgctcacgtatcagcattgcatgtgcgcgagcttccaatcaatgtctgagaggttctcgaataccattcaaaacaatgagcagacaaattcaatgggaggacggtgcaggcgccggcctctatagaattgtccgctagcaccaccatctattcatatccacacactgaccacctccaccttcacaactccactctcaattcccctgactactaagaaatatttcatggtggttacattggaggtatcccaacaccaagcacaaaatgaacccactaaccctctcatcctatccacggggaccacctttgagcagaacaccattcatattacaacctttagctagattaagataattatttagtacatattttatactattaaaaaaaaaaaaaaaa

SEQ ID NO: 1034 - DNA, 3945 bp, Hydra vulgaris
  source 1..3945: mol_type = unassigned DNA
tttctaatgttacgtgatatgatatggttagttcatggttagtttatgtttatgcttagtttatggaaaatcgtttatttatggcacaatattgtttgctgtttttaaatttatgtaacgtgtgcatttgatgtatattcttgaactttttaatctgaatttttacttggtttaatacgtttattatattcttcgattgagcaatttatcctatcaaagcaatttatccttcgattcgagcaatttatccttcgattcgagcaatttatccttcgattgagcaatttatcctatcaaaattagcatatatactgcaattttcaaataatctacgaaataagttcacttactgaaaatcattaagtaaaagaagaaaggaagaaaaaataaaaataaaaagtagtaaatcctttcataacaataatcattctattattaaatttaaaggaatattttggttttgtactaaatcatgcgttcatatttcaccgaagaagggggctgctatatttttgtttgaagttgtttatcttaaaactttaaacttgtgttcaaccaaccgtaaacattagttcgctgttcgctcaaattatctacaatataaaatttatcaatcttttttcgttacggtaaacaataaacaataaaataactatagttattttattgtttaccgcatattgtttaactatagttaaacaaagtatttgtttatggaacattaccagtatctcttgttaaggtaaacaacaaaacatagacggcatctctttttaaggtaattaagtatacggctaataataaaaatatacagctaataataaaatcttcaatgaacatggtttctatatgcaaaagatgtgatcgtagctttactacccttaagggactaaatattcataaaggtcaatgtaagatctttgtttccaatacaaataaacaaataaacaatgtagttaacaatgaattaacaacaccgaataaaaacaaggtggaaattaatacgatattaaactgcgatgagatatctgtagaacactattcaaccaacacaccttacttacccaaaataaatatttgtgaatctattatagatcccaacgactatctatggggtcatatgccgtttagcttccttctcaaccatgtcaacacaatatacgatgaaatagtattttaccataaaaacctttttaaagtgccatcaggaaaaggtggtaaaatgtttatagaagaactgaccttttggctaaaacagtttaataatcgaaccaaattgaatggaatagccatgaaatgtttcatgatagtcccttccctaatgttacagaagccctcaatacggtccaaagccaaagaacatgcagaatgtttagtaagacgaattacattatggagaaacgggaactttagtgaattgatgcgggaaattagatatattcagagcaaaattaacacctcaaaaaagaaaaggacatttgaggatatctcaaggatattcgcaaaactaatgatggaaggtaaagttgctgccgcactgaaggttttagatagagagtcatctggcatcttgcaatgctcggaaagtgtattgaaagaattgaaaagtaaacacccagacgaaactcctgtacaagataattgtttactatacggcccgttacaaaacactccagaatgtttattcgattcaattgatgagataagtatatttaactcagctttacagactaaaggatctgcaggtccttctggaatggatgcagatctttaccgtcgagtcctatgctcaaaatgttttggaccctcttgtaagactctacgagaagaaatagcaacatttacaaaaaatattgcaacaaaatcctaccaaccggatatagttcaaccctacattgcatgtcgactaattcccttagacaaaaatcccgggattcgccccataggaattggggaagtgttacgtaggattgtaggtaaaaccattagccaccattgtcaaaaagaaatcaaagaggcagctggaccactacaaacttgcgcaggacacggtgcaggagcagaagctgcaatacatgctatgcaaaagatatttcatcaggaagatacagatggtgttttgttaatcgatgctaggaacgcgtttaactgcctaaaccgttctgttgcactacataatatacagataacttgcccaatcttagctatgtatttagtcaacacttaccgtaaaccggcaaaattattcatctacggtggagaaactattttttcgaaagaaggcacaacgcagggcgatcccctcgccatgccatggtactcacttagcactgtgacaatcataaatacattgaaactagtaattcctgatgtaaaacaagtatggttagccgatgatgctaccgctgcaggaaaattacagtctttaaaaaagtggtataaatgcctagaggatgtcggtggtttgtatggttattatgtaaatcagtcaaaatgctggctaatagtaaaatctgataaccaagctgaagaagctaaacttatatttggcaactccataaatataactactcagggaaaaaggcacttaggagctgcacttggttcggaagcatacaaaaaagtgtattgcgaggatttagtaagtaaatggtctaaagaacttaacaatctctgcgaaatcgccaccacgcaaccacaagctgcttattcagcttttattaaagggtacagatctaaattcacttacttcttacgcacaattgaagcttttgaaaatttcgtaacaccagtggaaaaaattttatcagaaaaattattacctgtattgtttggaactgattgttctataatcaaagaaaatagggatttattggcgctaaatccatcggaaggaggacttggaatttgtaacttaataactgaggccaaggaacagcatactgcctctaagaaaataactaacttgcacataaaatcaatactcgatcagtcagatgttatgaaagaaaaagatgatttcgggaaaacattttcagaaataaaaacaaaaacaaatatggataaatctaaaaaaaaaaaagaagaggttaaaaaaatacatgcaggacttccagaaaaccttaaacttctggttgaacaggcctgtgacaaaggtgccagcagctggttaaacaccttaccaattaaagaacaacatctagatctgaataaggaagagtttaaggacgcacttagattgagatataatgtgccacttgccaatttaccatcctactgtgcttgtggagaaaaatttgacgagctacacgcaatgtcatgcaaaaaaggtggctttgtttgtaacagacatgataacatcagagatttattaactgtttgcctaaataaagtttgtactgatgttcaagcggagccgcatttaattccattgacaaatgaaaaatttaatttcaaaactgccaataccaacgacgaagctagattggatataaaagcaaaagggttttggagaaaaggagaaactgcattttttgatgttagagtaacgcacgtaaactccaaatcctccaaaaaacaaccaacaaaacacatattccgtaggcatgaagatgcaaaaaaacgtgagtatttagaacgagttctagaggttgaacacgggacatttaccccattaatttttggtacgaatggtgggtttggagacgaatgcaaacgcttcacggcactactcgcacaaaaactgtccttaaaaatgggtgagcggtacggagctgttataaattggctaaggacacgtctttccatggagattactagagcctccctactctgcttaagagggtcacgaaccccatttaggcattataacactgacgatgttggcctggaaaatgtgcaatgtggacttatttaacttgtatttttaaattgttttattagttt

SEQ ID NO: 1035 - DNA, 3489 bp, Lactuca sativa
  source 1..3489: mol_type = unassigned DNA
acattaaattagagaggttgatgtttcaatggaagaagatgaaattccaagaagctatttttgttgcccaccaagtgtttgataaaatgtccaaactaatttttctcttgttgcagctttattgttcaagataatgtagtttgcttagtttgagcgttccttgtgcacaccaacagtgtgttggtgtgccatttcctttccttcctttttaactattgcttcatagcttaagcttcatctcgaggcttgttctcttgtatggcttcttcttctacaagttcgagtgatatttgtctgtgcccgttcagaagcttccattgttgcccaaatggtgaagtgggaagtaaggggattgkccgtatgatttcacacatcaaaaggcatcatctacttactgaagatcgtaaatgtgttttacgtgaagctctttctagtgatgttggtttatttatggcggtggaagaaactttgaaggcctttggtcaatggatgtgtgggaagtgtatgactttgcatgctcttagccgttattgtcatcacccggatggtcgtgtgagktttgttacaggggctgacggctcgagtcgttacattgtcggtattctaaagccgtctactaaagagtcggtgacaaatgctcttggaggtttggtttttgatgttgggctccttgatcgtgtttttaaagagcctatcactactgtcaagagtatcccccatagttgtcgccttgctttctctcaggctttgaaaactgctctttacaaggtgattgcccaacctggctcggttgatgcatggatttgtttgttacttcttcctcgctgcacactgcaggtgtttaggcccaaaaatagacaagaatgtaggtctgggaatagaaaatccttacaacaaagctccatcctgaagtccttggatacatgggggaaagaggatggtatcaggaagttagttcaaaatatgttagacaatcccgaggttggggccatgggacagggtggaggcatccttcagaaggagtctacatcaagtaacaccaacatcaggcagtgtctccgtaaggttgcagatggkcattttaccgcagcagtgaaagtgttatgctcatcgggtgttgcgccatataatggtgatactattaaagctttggaggacaaacaccctttcaggccacccccatccatgccgagccccataatttctgaacctccccttgtagcagactttgactgtgtatttggttgcatcaaatccttccctaaaggaacttcwtgcgggagagatggcttgagggctcaacacwtactagatgccctttgtggagaagggtctgctatagccacagatctcatacgtgctatcacttcagtggttaatttatggttagcgggaagatgtccgaccattttggcagagtttgttgcatccgctcctctcacgcctctgattaaacctgacaacgggatccgtccaattgcagtaggcactatatggagacgtctggtttccaaggttgccatgaaaggtgtgggtaaagaaatggccaagtaccttaatgattttcagttcggggttggtgtgtccgggggtgctgaggttgtgttacacagtgccaatagggtgttgagtgaacaccacgctgatgggtctcttgcaatgctgacagtggatttctcgaatgcctttaacctggtggatagatcagccttgctccacgaggttaagaggatgtgcccttctatttctttgtgggtgaatttcttgtacgggcaagcagcgagactttatataggagaccaacatatatggtctgccactggggtgcagcaaggcgaccccttgggccctcttctttttgccctcgttttgcacccgcttgtgcacaagattagagacaattgtaagctccttctccatgcttggtatctagatgatgggactgtcattggggattcagaggaggtggctagagtgttgaacattattcgggtgaatggtccaggcttgggtcttgagttgaacatcaagaaaacggagattttttggccctcctgtgatggtaggaagcttcgtgccgatttattcccaacggatatagggagaccttctttgggggtgaagctccttgggggggctgttagcagagacgcagggtttattagcgggctggccatgaagagagcggtcaatgctgttgatttgatgggtcttcttccacaactatgtgacccgcagagtgagctccttttgcttcgatcatgtatgggcattgcaaaacttttctttggtttaaggacatgccagccggtgcacatagaagaggcagctttgttctttgacaaaggattgcgcaggtctatcgaggatatggtggtatgtggaggccccttctttggagacatccagtggcgtctggcttccttacctattcgtttcggtggtttgggtttgtactcggcatacgaggtttcctcctacgcatttgtagcctcgagggcccaatcttgggcattacaagaccacatcttacgtgacagtggcatatgtggtatggactctgattacctatgtgctatgactcgtcttcgcgatacgattccgggattcgactgtagcggtttcactaataaggacaccccccctaaatcccaaaaagcattggcgtgtgccctttttagcaaaatcgtcaaagatatggaagtcgacttcgacatgactgttagacagaaagcagtttttgagtgtcttcgggcacctcatgctcaggattttctgctaactatccctattgatggccttggccagcatatgtctcctgtggagtaccgaactatccttcgttaccgcctcatgattcctctattcccaattgacgagatatgcccagtttgccgcaaggcatgtttggatacctttggggaacatgcggttcattgtagagagctccctggtttcaagtacagacatgatgtggttagggatgttctctttgatgcttgtcggcgtgctggtatttctgcgaagaaagaagcgccagtgaactttttgacggacccgcaggatggaagatccacacttagaccggctgacattttggtctttggatgggtaggagggaagcacgcgtgtgtggatcttactggggtctctcctctcgtcggtttgaggagcgggggtttcacagcagggcatgccgctttgaaagccgctgcgtgcaaagtggcaaagcacgagaatgcatgtatagaaaatcaacatgtgtttgtaccttttgcatttgatacatttggttttctcgcaccagaggcggtggagctcctcaacagagtccaacgggtcatgcattctaatgtcatatctcctagatccacagatgttgttttcaaaagaattagttttgccatccagaaagggctagcggcgcagcttgttgcccgtttgccttccatcgatatgtattgaactatattttatatattaaaaaaa

SEQ ID NO: 1036 - DNA, 5033 bp, Monosiga brevicollis
  source 1..5033: mol_type = unassigned DNA
catcttggcgtgaaccacgttgtcagacaaaatctgcaaccccgctctttgcggcccgcgttttggcggcgccctcgctcccaccgtgtccgctcgcttgctcgcttgcttgccccgcggacatggccactgagtccggcggcgaggattcttggacccaggtccgcggtgctaaacgcccgagtgccgaatcacctccaagcaacaccaccacctcgccttcccaaactcatcgttctgcaaaacacacaaaacatggcagcgctcgccacgaccgtaaccatgttttccctgaccccatgaccaccccgcttcgccctcacgcccgccactctgtccctaccgcccgtgcctcgtctcatgtgccctcgacgtcccccgctgccggtgcgaccgagtcttcggcacgtgccgtcgtgcccgcggccgagccagtgaccaggacgtcaaacggcggcggggagcaacatcccatcatcggaaacacttccaatgcttctccccgcacccctcgcacgccatccagccctcgctcctttgctcaagttgctgcggcaatgcctgccgccgccactgccacatcttcggcccctatgaccgaggatttgtcagcatcggtgccctctgagccaaatggcagcggggagcaacaaccctcgcccgagtccacagggcagacacatcattcgattcctaacacaccatcggattttttgaccatgtcttcggatgaaagcgactcccctcctcgctccaccgcactccgcgcgcccacccctatcgcccctcccgcgcatgatggtgacggtgacacaaacggcagtgccacgcctgagccattggtgcaatcacctacacccgctcaaatggtgctgccatatccatcgggtacacaacaaacccattccgatccctctccgccctctgcttcaccccctgccactaccattttgcccgctgccatttcacatcctgtcgaacacagtgagcatgcaaactcagccccacttggcgaagtcagtgagagtgaaacacacaatacagcgggcgaacacagtgagagtgagcaagatgttcttctcagcgatcccgctccgcccatcgctgccaacgtgctggatgcccagcgcaaggtcctgctgaagacatctggccacaggcaactcctcgcctgcccatttgggctttgcaaatgcaaggggccccgccttgaccgcaaagcctgggtcaatcatgtactacgcgagcacccctacgacgagcaagccactgatctggtcaagcaggtgatggaggccaaattggtcgcccagtgcaacaagtgtcacctcttcttcgaagctgctggtatcagtcaacaccgctcccgatgtggtgccaatctgaagcgagcgaccgaggcgttgtttcatgcggctggacacgacctgcttgagattatgcgtggcgcttggccccaacagtgtgtagggtctcgcatcagtgtctgcgagctgctcaagctcgcccggcatccactgatgcagcgcagccgctacccatccaacgccaccgagaccaagctgatggctgccaccctgagccagctgtattggtctgccgtccactcggactataccgctgaagagcgagagatgtgctgggctttgattttggccttgcctagcatgttgttgtctgctccctcgaccgcactgtctacgattgacctgcgcaatatgtttcacgatcgtctccgttggcttgtgacggggcaactaggtcgggtcgtggacgccatgcgcaaggcagtcgcacgcaagcagagccgtcgaggacagctgaacgccggcgcgggcgcccacccgaacgacgcagtcgaccagagcctcaggtcgctcgtccgcgacccggacctggcggacgaagcctgggcaaaccacgtcacgaaccgtctgaaccgaggtcagattgccaaagcatttgatgccgacaaggctcgtgccgtgattggtaattctgaggttcaggccgtgcgcgacctcttggtaccgcccgggctgaccccgtacattgcttcgacacccgcctccacgtctacactggcaccagccacggctgtgagctccccaaccgtgtccttcaccaagggtgagctccccaaggcgttggcggccaccaagggtgtcaccgacccctatggttggtctggtgagcttcttgcctccatctaccgcatcaaggagcacttcagtcaagtcttgggcccacgccagggttctaccagcgacccgactgctccttctgatggagacgcgcctcagggccccaccaccgccactggaggtcctcaggttgccttgaacaagatctttcaccacattgccaacaacaccgtgcccgagtcgattcgacatgccctttgctccatcaactacactatcctggagaaggccaatggcaagtttcgacccgtgggcacggattccatcttcaacaaggttgtcaaccgcgctctgctcgagcaacagcagccccatattgcccacttgctacaggccagtccagagctggccgtcggagtcaaggacggcatttcagcagcggttggcatggcctttggtgagcttcaagcctgtgagtctaccccgggctggaccatgctctccctcgatttcaagagtgccttcaactacaccgaccgagcacggctgcacgagattgtggccgacaaggtccctggcctcttgcgcgcctttgaacgacactatgctcgacccactacccactgcattgtcgacaagttcttcaaggtgattgacattgatgttggccaaggcattgtgcagggcaacgagctatcgcccttcttctttgccctgtactcctgtgaggtcctgggtctcctcgacgccaccactgactaccgctgcaaggtcatcaagtacctcgacgacattgtactgatgggtcccgcggaggacgtggcggccgacgtggagattgtcaaggctcgtgcagagtctgctggccttcatctgcagcccagtaagagccgcttctacatgcctcgccaccattcggcttccatcactgctatcaagtctgtattgccagatgccgtgcgcgagacggccaacacgggcatgacggtcttgggaacgccgattggccgtcgcgagtggatgaagaagcagctgaacgacaaggcaaagcacattgctggcaagctcaatgacatgctgacgaccggtgtctcgcttcaggccctcctcacggccatgcagtacgtgcctagcctcatcaaccacctctacacgctgcccccaagtctcacgtcgggcttgtccgagctcttgaaccgtgcttgcaaggacacctttgtcaaagccttttttgccaaggtaaacctgtctgcaccggctggagctgaaggtcatgacgttacgctggaacagctccttgaggctcgcctcttcacacgggccaacaccgggggctttggcctgcacgacttggttgagcgcggtccggtggcttatgtctgcaacatggccaagctggccactcgctaccctcgggtctacgatcgacttttggaggatgcatcgagggctgccgactttgaggcccacgtgcagcgagctggcttccagatggccacggtcaaggacgcggcgacccagcgaccagctgagatcattgccctccgctccaaggcggcactggacgacctgatggccaagtgcgcgctggacctgcagcaggcatatctggcctcacgcgagtggggcgtcagcactgtcttgaccatgcggggtcgggacaagttgcgtcgcttgagcgacacgacctttgccattgcggtcgtgtccatgatgggttttggcctccatgaactcatcaacgtcaagccgacggacaagtgcccgctctgcagcagcaagacacctcagccgcgactgacccgcgagcacctgctgacctgccgtcccatcaagcgtcacaacgcccttcgcgacgagatgggccgcctgctcaggtacgccaccctctcccatgtctgggtggaaaagtctggctacaacgccaacggtcagagctgccgcatcgacctgcactgccgcaacccctttcccggcggtgctctgggcccagctctgcccgacctgggcattgacgtgactgtgcgcacagcccaacccccgaccacctcgcaagcctgcatcaaggtgggcgctgcccttcgccgagccgaaaaggagaagcgcgactactacaccggtttcaaccatggaaaaactctgatcgtccctgcggcgatgacgacaaccggtgggttcgcctcctcctttgtggatctgcttggtcagctcgcccgctgcgccgaggcccgtggtgtgtaccagccggggctggatgaggcctttgttcctcggtggaagggtcgctttgcggcgctggtccatcagatgaacgctgaccacatccagcgccactttggcggtgtctgcctgcgctcgtcgtaggtaggcaccgtctcgggggtccctctgtggggatccctgtgtgcacctgtcgctccctaggtggttcctcgttgtgtcttttgatggcttgacttgtatttttgttttaattttgctttaatttttgctgtatttgtgtggtatttttgctgaatttttgtaaggtcctttgtatgatgtctttgtcttctgtggtcggttgttttcctcaatccgacgttgtgtctcgttggatgtgagcgtgccgtggtgttctttgtgtttgtgctgtgatggcttgtagttgtgatgtgtgactgcctttttgggtgtcttgtgtttgaaatggccgtatctctggttatacttggtcgttttgtacgatttttgtttctatgtgcgtgattcttcgcgcttgtacttcttggcatgatagaagccaatgaatgtgtcttgttctcttgtgttgttttgcgtgccgtcgtgattttgatgtcggggttgcacagctttgctttcagctctgaggttcaaacacctaattta

SEQ ID NO: 1037 - DNA, 3776 bp, Hydra vulgaris
  source 1..3776: mol_type = unassigned DNA
aatttaaaaaaaaaaaatcgtttatttatggcataatactgtttgtaatttttgaaaattcgtgcaacaactgcagttaaattgaagagctgaaatttaagatctgagcttttcaatcagagttttttaccctaaaacattaaattttatcataacaaaaatcgttctaatattattaaacttaaagaaattcgttcttatatcaaatcttatttcagtgtttcacagacgaagggttttactagatttttattttttcaacttttgaatttgtttattataaaactgtaaactagtgtgcaaccaaccgtaaaaawtagttagctgttcacccaaaatattattcagtatgaaaatatttaatcttctttattcgcagtaaacaataaaatatctagttaaacaaaatatttcttaataataaaaaacaaaaactttttcttaacaagtacaatgagcagctgcaaagttactatacctcatgtgtgcccttattgtaaagtagaacttaaaacaatatgcggaataaaccgtcacattttaaaatgcaaaaagaatcctttacaaatacccagtctacaaaaaactaatacctctttaacactcgaaccaaatactaaagtaataccctcaattacaaaacaaaacgatattataatagcatccacttcgtctaacaacttagcgtttaatcaaaaaaaggactacacattaacacctacatattctagaaaaacgacacccgtaagcatactgtcttctatgaaaatgacacccataagtataacatcacatatagttcgcagaaaactacctgagcttccttctcaaacaacaaatcatttatttaatgagaattttataaatgttcccttcttgcctgaaataatgaaccatctaccagttccaaataacaatgtcatgtggggagtatactcatatcaacaatttaaattgtttgtggattctacctatgatgagatcgtaaattaccgaagaaatattttcaacattccatctggaaaggcaggtaaagaatttatagaggagctaaccttttggttaagaaagtttaattccacttctagtttaaattcaatcgcgctgaaagttacaatgattttgccgaatcttcttttgcaaaaaccctccgccaaatcaaagtccaaagaacatacattatgtttaactcgtaggattgacctttggaaaaaaggagatactagtttactgttaaaagaagttcgaaatatacaaaaaaaatttgtaaattccaaaaakaaaagatctatggacgatatatctagaatatttgccaaattaattatggaaggcaaaatcactgcagcgctgaaatttttagaaaaagaggcatcatccggcatactaccactatcagacaacacattaaaagaccttaaaagcaaacaccctgaaccctcccgagtagaagattatagcttactgtttggtccgattgatttaatcccaaaatgtttcttcgattgtattgatgagcaactagttatgaaagcagcatttgcaactaaaggatctgctggaccatcaggaatggatgccgatatttatcgccgcatcttatgttctaaaaacttcatcaaagaaggtaaagaactccgaaaagaaattgctaaaatgacacaaaacttactaacagaaacatatgaaccaacatttctagaagctttcactgcttgtcgattaattcctctagataaaaatccaggtattaggccaattggagtaggagaagtattaaggcgtatcataggtaaagtaattagctggagtttcaacagtgagataaaagaggcagccgggccattacaaacatgtgctggacatggggcaggagccgaagcggctgtacatgccatgaaggaaatattcgacaatgtgcaaacagatgcaatacttttgattgacgcaaagaacgcttttaattgtatgaatcgacaagtcgccttacacaacatccagatcatttgtccattaatttcaatttacttaatcaatacttatcgaaatccatcgaggctctttgtggcagggggtaaagaaatatcatcccaagaaggcacaactcaaggtgatccccttgctatgccatggtactcttgtaacaccacgattattatagaacacttacttgtaaattacccacaagttaagcaggtgtggttagcagacgatgctgcagctagtggaagcattgcaaacttacatagctggtatcaacaccttattgatgaaggatgtaaacatggctactatgtaaaccaatctaaatgctggttaattgtaaaatccccctcgttagcagagaatgcaggcatagtatttggtaaatcggtcaacataactacagagggtcaacgacatttgggttcagtaataggttcgcaaaattttaagaacaaatattgcactgagaaagtagcaaaatggttaaccgagttaaaacaactttgtaaagtagcagagacgcaaccacaggccgcttttattgcgtttacaaaaggatttcgttcaaaatttacatatttcctaagaactattccaaaatttgaacaatatctagcgcccgtagacgaaatacttagtcatttgttgttgccaactctttttggaaaagatacgccctttgaggatcacattagaaaactttttacattaactcctcgagatggaggattgggtatacctatactagttgaagaagcgcctcaccagtttttatcatctgttaaattaactaaaaatcttgtacagcaaattatagatcaagataaaattttaaaaacaaaaaactcttccgggaatgttctagaagatcttgaaaaaatattaactactgacagacttaagcatcgcaaagagaaaataattgcagttgattcaatgcaaccagattcaatgttaagaaacatacagcaaacaagaagcgaatgtgctagcacctggttaaacgccttaccactagaaaaccaaggttttgttttaaataaagaagaatttcgagatgcactttgcttacgttataattttgacttgaaaaatatccctcgtatttgtgaatgcggagaacctttcaatgtaactcatgcattgtcgtgtaagaaaggtggcttcatttcaagtcgtcatgataacataagaaatttgttcaccacattgcttaaaagagtgtgcataaatgttcaatccgaaccacacctcataccccttgataatgagaatttttatttccatacagcaaataaaagtaaccaagctcgtttagatattaaagcaaatggtttttggcgaaatggacagacagcattttttgacgtaagagttacgcatgtcaattccatgagcaacaaaaatctagatatagctgctatattcagaaaacacgaaaaggaaaaaaaaagagagtatggcgaacgagttcgtgaagtcgaacatggcagcttgacaccactagtgtttggtacaaatggaggtatgggtaaagaatgtcatcggtttgttagaaggctagcggagaaactagcggaaaaacaaaatgaaaaatactcagttgttatgacatggttaagaacaaagttatcttttgagatacttcgctcaactatcctttgtttaagaggctcaagaacaccctggactaaaaaaaacgattttgaaatcggtgttgattttaagatggatgctctagaagcaagaatctgagctcttataaatttatattatagcattttgtttta

SEQ ID NO: 1038 - DNA, 5034 bp, Magnaporthe oryzae
  source 1..5034: mol_type = unassigned DNA
cccgaacccgaacccaaacccaaacccaaacccaaacccaaacccaaacccaaacccaaacccggagggttcccaagtcgcctaaacccgaagggtttaggatattatttcgtttattagaattggataattatttacccctgttggacaggggggttgcaggggttaaattaaggttttttattatttatgcgccgtttatttgtttacccccccaaatattataaaagcgcgttccatcctcttaggaaaagcgaagcttttccttgtaaaagtcgctagacttttactataaaagtcgctagacttttataccaatcttttaacaaaaagcgtagctttttgttgccaatctattaaaaaaagcggagctttttttaactttttcttttttttttttttttcttttttttttttttttttcttttttttttttttttttttttatatatattattattattattattagcggtggggctatttatgcgctttaatttgtgcggggctatttatgcgctttaatttgtgcggggctattaatgcgctttaactttacaaattttatttatgcgctttaattgctgcgggcctgttaatgcgctttaatttacaaatttcattaatgcgctttaacttttatatttactaatgcgttatttatataattgctattattatcgttgctattattattattgctattattatcgttattattattgcaattttattatataaaccctcgtttgtccctcgatttatcccgtttcttttccatcccatcgcgcgttttcgtaagctttggttttcgtaggatttgctttcgtaggctttgctttcgtaggctttcgtcagcttttacctgcttttattttttctttttctttttattccccccccttttttttacctggtttattagcggtttacctgcttttattacctggttcccctttacctgttttattagcggtttacctgcttttattacctggttcccctttacctactttataagcggtttacctgcttttattacctggttcccctttacctgttttattagcggtttacctgcttttattacctggttcccctttacctgttttattagcggtttaccagcttttattacctggttcccctttacctactttattagcggtttacccgtttctattagtgggcatttatttcccgtttttattagcagttaaatttacccttttaaggttatttacctgcttttattcacagggcacccctgtttttactagcagttaaatttacctttttaaggttatttacctgcttttattcacagggcacccctgtttttaccagcagttaaatttacctttttaaggttatttacctgcttttattaacaaccctttattttttcctattaacgggtatttatttacctgttttattggaattcacccgttggacggcatggtttgcccaacctgtaacggcgtttacgccgattacaacgaccatatccggaaaaaacacccggacgaacgttataccgccctccaactccaaccattgggtttaaccccctgccctatatgcaaaaccgcttgcaaaaacgatttgggcgttaaaacccacctatccaaaatccacaaaatatccggtgcatcgaaaatttcaacccaaccgcgtatacgaacggaaaatacggataataccaattcggtccccacgtcgtcgtttaaccctgtccttcccgaaatccaaacgttaaccccggggttaaataacagccgttgggccgataaccccagaaaacgacgggccgataccccctccccaacacggggtcggaatacacgcccacgtcgattttcatatacggatatcgatttaacaaacgacgaaccggcggataaccccagggctaataaccccagggttaataaccccagggttaataacgaacccccctccagcccaaattcgttaccttcgatttccgaatttcacacccctgggaccctacccctaaccaattcgaatatatcgttaaaagaccagcacgacaaaattaccggccctatattgcaaaaaccgttaatccaaaaattaatcgaatattcgaaaatcccaatcccagaacaccacctccacgccaggcaggctaaaatttttgctgacgccgcaaatcgaatcgccaaaaattttatacaaagcccaacggagaaaacattatttaatttacttatattaccccgcatattcggtatcgggttaataaacggaaaagtaactaaaataatgcaaaacttcccatcccaaataccccctattccaaaaattgattttccatccgaaaaaaccgattccgacccggttttaaacgccaaaaaattattggaaaaagggtatattggccgtgcggcaaaggctattatcgatccaacccccgttgccccagaaaccccggaatcgttaaatattttacgggaaaaacaccctattggccaaaataacccgtttaatacaaaatcccaaccaatatcaggcaggcaaattaccgaaaaagctattttattagctatttcgtctattggccgggaaaaagctccgggccttagcgggtggacgagatcgttattagatgcagccattaaaatacctacccaaaacgacgtaattccggctttacgactcttaacggatatgattcgccagggtaccgcaccgggtagggaattattatgcgcttcgcgtttaatagggctatccaaacccgacggcggcgtacgcccaatagccgttggggacctattatataaaatagcctttaaagctattttaaataccctatggtccccaaactgtttattaccttaccaattaggtgtaaatagtataggtggcgtcgaacccgctatttttaccctcgaagaggctataatgggccctaatattaacggtataaaatcgattacctccctcgatttaaaaaacgcgtttaatagcgtatccagggctgcaatagcctcgtcggtagctaaatacgcaccaactttctaccgttctacctgttgggcctataaccaaccttcgattttaataacggaaaacggttccgtcctggctagtgcacaaggtatacgccaaggcgatccgttaggcccgttgttattcagccttgcttttcgacctacgttggaaacgatccaaaaatcgcttccatatacgtatatagcggcttatttggacgacgtttatattttatccaaaacgcccgttaaagataaaatagccaaaataatcgaaaaaagcccgtttaccctaaattccgccaaaacgacagaaacggatatcgatacgttaaaaaccaatggtttaaaaacgctcggctcgtttattggaccaacggaattacggaaggaatttttgcaaaataaaattcaaaatttcgaatcgtccattaacgccctgaaaaaactccctaaacaatacggattgctaatcttgcgtaaaagtacacaattacttttacgccatttgctccgtactttaaattcccaggacctgtgggaattatgggaaaaaacagataaattaatagcggatttcgttataaatttaactgttacaaaacggaaaaaacggccaattacggatttcgttacgccgttaattacgttacctataaaggacggaggttttggattattacggcataacggaatagcccaagatatttattttgcggccaaggatttaacaaccgaaattcggcacaaaatccaacgtatatccaacgattttccacaaaatcaaagccctaccgccaccgagattttgcatttgttgcataacggggttttagcagattgcaaaaacgggttaacaaacgcccaattaaacgctttaaccgaaaacgctagttatttaggtcgaaaatggcttaacattttacctatccaaaaatcaaatcgattaacggattgggaaatggctgaagccgttcgattaagattattagccccggttaaaccgttaacccacccctgcaaccattgcggaaatcggaccaatataaaccacgaggacgtttgcaaaggtgccgtacgcaaatatacggcccgtcacgaccaaataaacagaagtttcgtcaattcgttaaaaagtcgaccagaaatcgacgtcgaaatcgaacccgatttaaataacgaaaataacgtaaataacgccaatacaaccaccgaaaatcccacccctagccccaacggccaaaacgataccggatgcctttttacaacccctattcgctccgggacccgtaacggccaaaacggccttagggcggattttgccgttattaacggcgtatccaaatattattacgacgtgcaaatcgttgcaattaataaggattccggtaatacaaatccgttaaatacgttagcagacgcagcaaataacaaacgacgtaaataccaatttttggatccatttttccatccaattataataagcgccggaggccttatggaaaaggatacagcacaggcgtacaaacaaatccaaaaattaataggccccgttgcggcccattggttggatacgtcgatttcgttaattttgttacggtccagaacgacggcagcaatttctattgctaaaaaccgccctcgtgcgtaataggtaacgtccctatttttgtctttggttttgtttttatctttgtttttgtttttgttttcgtttttgtttttgttttcgtttttgtttttttttttgtttttgtttttgtttttgcctttgtttttgtttttatctttatttttgtttttgtttttactttgttttatttgttttatatttaccttttgattttttctatttttcccacccttattattataaccccaacctactaatattttttcttttttcttttttctttttacggttttattttcccgtttgttttttctattttatttgtacgacaaaacccttagcaaataagcttagaatataataaagcgcgaattaaaa

SEQ ID NO: 1039 - DNA, 3666 bp, Branchiostoma floridae
  source 1..3666: mol_type = unassigned DNA
ttttcagtctggctcagccagtgaccgccgggaaagtccggctgactaccacgaatagggtggtgacagctggatagacagacgacagctcggaaagacggcattggggcagtatgggttggcacccctaactgcatctcccctaggagagcatcccgcaacacgctacaaagaaccacaaagagcaatacccccagggatgcccgagagggggggaggatgagcatcccattcggacggtccaatcggtattgaccccagcaaacggagaatcgacaatgaatgcagtctgtgtgtgtggcaaggtatgtaagaaccagagaggtttgagaatccaccaaacaaagatggcctgcttaaggagggtgcaggcggagcaccgctcaggggctgtggcaaccactgtagaaccagtgttgtcagcatcagcccctggtcagacggaggaggatcagggcccggaagctccccacagtgcccggaacctccgcgcaacgcctgcccctccacaaggcaggaagtcagatcatcaccgagtgaagtggccagccgcaaactccaaggagtggtcgcagtttgacgaggacgttgacatgatcttggagtcggtgtcaagaggtagtacagaccaaaagcttcagtccatgtgcacagtgattatgtccatgggggcagaacgatttggcacgattgggcagaggaaaccgacagacacaatgaagccaaatcgccgggaagtaaagatccgtcaactgaggcaggagctaaagtcgttgaggcggagctttaaggcgagtacgtcgggagaggagagagctgctcttgcagagctcacacaccaccttagggagaagcttaggaccctcagaagggcagagtggcacaagaagaagggtaaagaaagagcccggaagcgcagtgctttcatcaccaaccctttcggcttcaccaagcgactcctagggcagaagaggagtgggaacctgacctgcccagtcgaggagatcaacctccacctcagcaataccttcagtgatgcctcgagagatgtggatcttggtccttgccctttgctggtgacttcacctgagccggaagtgcactttgacatctctgaaccaactctgaaggaggtcagagagacagtcaaggcggcgaggtccagttcggcgccaggtcccagtggcgtggtatacaaggtctacaaacattgcccacggcttgtggtgcgcctctggaggatcctaaaggtggtctggcgcagaggtaaagtggcggctgattggaggcaagccgagggggtttggatcccaaaggaagaggagtcaagtaaggtagaccagttccgcttaatttctctgctcagtgttgagggaaagatcttcttcaagattgtggcccagcgtctaataaagtaccttctggacaaccagtatattgacacatctgtgcagaaggggggagttcctggtgtcccaggatgtcttgaacacacgggcgtagtgacccagctcatccgggaggctaaggagaacagaggggacttggcagtcttgtggctggatctcgcgaatgcgtatggttcgatcccccacaagcttgtggaaacagcactgaccagacaccatgttccagagtcaattcagaacctcatcttagattactacagcaacttctggctaagagctggctccagtacagcaacttcagcatggcaacggttagagaagggcatcattactggatgtacgatttcagtgcccctctttgcactagcgatgaacatgattgttaaaggagcggaagcaggatgtaggggtcccgtgtctaggtctggaaccaggcagccgccgattcgagccttcatggacgatctgacggtgatgactgcaacagtcccggtgtgtagatggctcctacagggattagagcgtctcattacatgggcacggatgagtttcaagccggccaagtcaagatctcttgtcctgaagaaggggaaggtggctgaaaggttccgtttcaccctgggaggcactcagattcccacagtgtcagagaaaccagtcaagagtctgggcaaggtgttcaacagctctctgaaggacaccgcttcagttcagcagactaggagtgacctgacaacgtggctcgagggaattgacaagacagggctacctggtagcttcaaggcctggatgttccagcatggagtcttgccaagggtactctggcctcttcttgtgtacgaggtgccgatgaccatggtggagcaactggagagaaccatcagcaggttccttcgcaaatggttggggctcccgaggtccttaagcaacattgccctgtacggtagatccaccaagctgcagcttcccttgagtggcctgactgaagagttcaaggttacccgtgcaagagaagtgttgatgtaccgggactcctcagactccaaggtctcttcagccggcatccatgtcaggactggaagaaaatggaaggcacaggaagcagtggatcaggcagaggcaaggttgagacacagtgtcctcgtggggtccgtggcagtaggacgggcaggactgggcagctgcccaaagcctcggtacgacaaagtcagcgggaaggagaagcgtctactgatccaggatgagataagggctggggaagaggaggatcggcgatgcaggatggtaggcatgcgcaagcaaggtgcgtggactaggtgggaacatgctgactcccgcaaggtcacatggccagagttgtgcagagctgagccttctcggatcaaatttctcatctcttcagtgtacgacgtgcttccaagtccagctaacttgcatgtctggggcttggcagagaccccctcatgccaactctgtcagaggagaggtacccttgaacacattctcagttgttgtccgaaagcactaggggaagggaggtaccgctggcggcatgaccaggttcttagggtgttggcagacacagttagcaacgccatccagagtagcaggagtcagcaaccccccaagaagtcaattgtctttgtcagggccggagagaaaacccgacaacaacccacttccgcaggtgggcttctctccactgctagagattggcagcttctagtcgaccttgggagacagctcaagtttccagaacacattgtagccacgtcacttcgccctgacatggtactcgtgtcagaatccaccagacaagtggttctgctggagctaactgttccctgggaggagcggataagcgaagccaacgagcggaagagggcgaagtatgccgaactggtagtacaaagccagagtaatgggtggagagcccggtgtgtaccagtggaggttggttgccggggtttcgcagggcagtctttggcttatgtgttaaaactccttggagtaagaggtttccgtcttcggaaatccatcagggatattctagaggctgcggagaaagcctcacgttggttgtggttccgtaggggggaaccgtggaagccacacggacacaggtcggggaatgatcaacctcggctgggtcgcccgggcgagggtgtatggtgattaaagacccgaaacacccaatgaccccgggttcatcactgatgatgtgtccctgttcgcactaccagagtgtattctagag

SEQ ID NO: 1040 - DNA, 3639 bp, Danio rerio
  source 1..3639: mol_type = unassigned DNA
ttcaagcctggcgcagccagtgactcctaggaatagactaggtggcaaccaagaatagtttggtcgactactggagagacagttgacggcacggaaagacggcacttgggacagtatgggttagcaccccagcctgtgtctttcgtgagagagaacccaaacaagctacggaaagccccacagagatatacccccaggagatcccgagagggggggaggatgagatctccaatcggacggatcaaaggttaatgacccatgcaaacgaacagacgacgaacaaaatatatgtgacatgcatttgcggaaagctgtgtaagaaccattggggcctaaaaatccatcaggccagaatgaaatgtttggagcaggagagtaaggtgcaacgcacaggtcctgaacctggtgagacgcaggaggagcccggcccggaggcaacccacagagccaagtccctccatgtaccagagcctcaaactccaagcgaagtagttcaacagcggattaaatggcccccagccagcaaaggaagtgagtggctgcagttcgatgaagatgtgtccaacatcattcaagccatagccaaaggagatgcagatagccgactcaaaacgatgactaccatcatcttcagctatgctctagaaagattcggttgcatagagaaaggaaagaccaagcccaccaccccctacactatgaaccgtagggctacccagatacatcacctgcgtcaggagcttcgctccctcaagaaactgtataagaaagctacggatgaggagaagcaaccattagcggagttgaaaaacattttgcggaagaagctgatgatcctacgcagggcagagtggcatcggagacgagggcgagagagagccaggaagcgagctgccttcatcaccaatccctttggcttcacaaaacagctgctcggggacaagcggagcggtcgacttgaatgctcaatagaggaagtgaatcgcttcattgaggaaacagtgagtgatccactgagagagcaggagctggagcccaacaaagctcttatcagccccacccctccagcaagagagttcagtttgagggggccaagtctgaaggaggtcaaggaaatcattaaggcatctcgctcagcatctactccaggccctagtggcataccttaccttgtctataagcgctgcccagggcttctcctgcatctgtggaagatcttgaaggtgatttggcaacgaggaagagttgctgagcagtggaggtgtgccgagggagtgtggattcctaaagaggaaaactcgaaaaacatcaaccagtttcgaatcatctctctattgagtgttgaagggaaggtgtttttcagcatcgtctcacgaagactgacagagttcctcctcgagaacaattatattgacccttcagtgcagaagggagggattcctggagctcccggctgcttggaacacactggagtagttacacaactcatcagagaggcccatgagaacagaggggacttggttgtcttgtggttggacttggcaaatgcctatgggtccataccccacaagctggttgagctcgctctacaccgccaccacgttcctagtaagattaaggacctaattctggattactacaataatttcaagatgcgggtcacatctgggtcagaaacatcaagctggcatcgcatcgggaaaggaataataacaggctgcaccatctcagttattcttttcgctctcgccatgaacatggtggtcaagtcagccgaagtggaatgcagagggcccttaactaagtcaggtgtgcgacagccccctattagagcatatatggatgaccttaccatcacaacaacaacggtcccagggagcaggtggatcttacaaggacttgagagactcatcgcctgggctagaatgagttttaagccctccaagtctaggtccatggtgctgaagaaggggaaagtggttgacaagttccatttttccatctcaggaagtgtcatcccaaccatcacggagcaacctgtcaagagtttggggaagctctttgactccagcctaaaagactctgcagccatccagaagtccaaaaaagaacttggagcttggctggcgaaggttgacaaatccggcctgcctggtagattcaaagcctggatctatcagcattcaattctgccccgagttttgtggcctctgctgatctatgcagtcccaatgtcaacagttgagtccctagaaaggaagatcagtggctttcttcgaaaatggttgggcctcccacgcagtcttaccagtgctgcactatacgggacaagtaacaccttgcagctaccattcagtggcctcacagaggaattcatggttgtacgcaccagagaagccctacagtacagggactctagagatggcaaggtgtcatcagcctgcatcgaggtgaggacaggcaggaaatggaatgcagggaaagcagtggaggtggcagagtcacgcctgcaacaaaaggctctggtgggcactgtagcgacaggcagagcgggcttgggctattttccaaagaccttagtaagccaggtcaaaggcaaggaaagacaccacctactccagggagaggttcgagcaagtgtggaggaagagagagtcagtagggtggtaggactccggcagcagggagcatggactaggtggaatacactgcaacgtaggatcacctgggcgaacatcttgcaggcggatttccaacgtgtccgtttcctagtacaagctgtctacgatgtactgccaagcccatcaaacctccacgtttggggaaagaatgagacaccttcctgccttctttgctctggaagaggctctctagaacatctcctcagcagttgccccaaggctctggctgatggtcgctatcgttggcgccatgaccaggtgcttaaggcaattgctgcgagcttagcttcagccattaacacgagcaagaaccatcgtgctccaaggaaggcagtccacttcatcaaagctggagaaaaaccccgggccctcccacaattaacaacaggcctccttcacaaagcctcggactggcagctggaggtcgacctgggaaaacagctgaggtttcctcatcacatcgctgcaacacgtctccgtccagacattatagctatctcagaagcttcaagacagctaattattctggagcttacagtgccgtgggaagagcgtattgaagaagcaaatgagaggaagcgcgctaagtaccaggaattagtggaggagtgcagggagagaggctggagaacttactatgagcccatagaaattggatgcagaggctttgcagggcgttcactttgcaaagtcctcagtcgtttgggcattacaggcgtggcgaagaaaagggccattcgatccgcaagcgaagccgcagagaaggccacaaggtggctgtggattaagagggcagatccgtggactgctgttgggacacaagtcgggacttgatcaaccccggctgggtcacctgggtgagagtgtatgatgttgagagacccgaaacactcaatgatcccaggatacatcactgatgatgtgtcccaaatgcatccatgagatgtttcttgcataa

SEQ ID NO: 1041 - DNA, 3487 bp, Branchiostoma floridae
  source 1..3487: mol_type = unassigned DNA
ctgaccagcagacgggaagcccgcgaccaactagtctccgcaaatattgcacacagggcgaccctatggagctgattcagtcaaatttcctctgagatataccgataactatctacagaaactgcacagttagtttggaaagagcttttctactgaaagacagcaaaatccgccactttagacgagcgtcaagactgccctccccataaccaatatggcgctacctgctgtacgttctggaccagccagcacctggacactgttaatcacgctggtcatcgtcgctgctaaaggtacagatggttttatgtcttttaaactgccactgctgtctactgatacctggtctgggtataacaatgatgtgaaaaccctgctaggcccgctccaccacgaactggccacaaatgaaatgtcccccaaactagctggggagggattcagtgacatcatgtgcgactttatggccagtaaaccagagttcagccacactaccgaagaaagtcactcagaaggctatataagccacgaaccacagtctctcgcacaagtaaaacgcctgaaaaacaagctacgtaagaaggcattcagagctgacgcaacacctgaggatcgaaaggctttcagagatgcaattaaaacatactccttcatgaagcgacaacagaaacgaaaggaaactacaaaatcggcagcacaccaagagaaagaatatcataagaacttttggaagtttgccggaaaatgtgcaaaaggacagctcgatatccccccagtaaaaccggcattctctgtttattatgcaaatgagtactacaaaaacaaatactcacacccaacccgtgttgacttcaacaaactgctctggtttcctcatttgccggtggaggaacaactacctgcgaactcttttgacatgtcacctgtcaggccgaaagacattaaggcagtcttatccaaacgatgcgctacatctgcacctggcccggacgggatcatgtatggccacctcaagcacctgccagcttgtcacctgttccttagtacactgttctccaaactgcttgagtccggagacccaccgacatcatggtcatctggcaacgtgtcacttatacacaaggatggtagtccagaagctgccgaaaactttcgaatgatctgccttacttcctgcgtctccaagattttccaccaaatactctcggaacgatgggcaaagtacatgacttgcaatgatctgatagacccagaaacacaaaaggcattcctgaccggaatcaacggctgtgtggagcatgtccaagttatgcgggagatcttagcacatgccaagaaaaaccgccgaacagtccacattacatggtttgacctcgcggatgcctttggttctgtagaacacgaactgatctactaccagatggagagaaacggcttcccgccaattatcaccacgtacattaaaaacctgtattctcgcctgaaagggaaagtgaagggtccaggctgggaaagtgatccgttcccgttcggaagaggagtgttccaaggagacaacttgtcacccatcatcttcctaacggtgttccagcctattctacagcatctcaagggagtagagcagcaacatggctacaacctcaatgacaagcattatgttacactgcctttcgcagacgacttttgtctcataaccacaaacaaacgacagcatcagaaactaattactcaaatttcttccaacacaaagtcaatgaacctaaagctaaaaccacgcaagtgtaagtctatgtctatagtgagcggaaagccatcggacatcagcttcacaatagatggggaccctgtcaaaacgaccaaagatgcaccggagaaattcctaggtggctacatcaccttcctgagtaaaacaaaagagacctatgacatcctagcaaagacaatagaaacgactgttgaaaacataaacaaatcagcgataaggaacgaatacaaactcagggtttacatggagtacgccttcccatcttggaggtacatgctgatggtacacgacctgacagacacccagctacaaaaactcgattccatccacacaaaggcgatcaaaacatggctcagaatgcaacctagtgcaacaaatgcaattctgtacaacacaaggggtctcaacttcaaaagcatctcagacttgtacctagaagcccacgctctggcctacagtaggtcagtcctcaaagcagatgagaaggtaaaacacgctttacaagccaaactggaccgcgaatcgcaatggactaggaaaatgcagaaatggggtattggaaagtgtcacaccatccaccagcaagccatccatgtagcaaaggactcagaatggacatcagtacgcaaacatgtcaaacaacaagtcacagatatgcgtcatgacgtctggactaaacatcaggaaaaccttctacagcaagggcagatgctacaactgcttgaggaagaaaaatgcgacctgacatggcggtccgctatgtacaacctgccgaggggcatcctcagtttcgctgtgcgtgcctccatcgacgccctccccacactctgtaacctgaccacctggggaaaacgtaacactgacaaatgtaaactgtgtggcaaccgggaaacactccaccacgttctgaaccactgcggtgtcgctctccaacaaggacggtacacattccgacacaactcggtattgaagcacataacggacaccatcatagagtccattgacacctctcggatcaacgccaccatctatgcggacatacaaggttacacaactaacggaggtaccatcccggtccatacaatacccactacccagaaaccagacctgatcatatatttaccagaacagaagaccctccacatccatgaactgactgtaccctttgaaaagaacatcaaaacaagtcatgaccgaaaggtcaacaaatacagcaccctagcggcagatttagaaactgctggcatttccgctacactaacctgctttgaagtcggatcaaggggactcgtcacgccagagaacaagaccaggcttagaacactgttcaaaatagttaaagccaaaccaccgaagactctgtttactgatataagccgcattgcgatgttatcgtcatatgctatttggaactcacgccacgaaccgtattgggagtcagaaacgctattgtagaaacccacaaggctgagaaatgtagagcatctgtatggacaatattgatgattgaaatgttgtgattttagatcaaatttagaaatatgaaaaccgaactaaactaaatataatgttttttttaaagtaatgataagcaatacccacattgtgcaatactatctatgttatgtcctttgtcccccctgcatgtttggtcaataatgaccatcgtgtcctgggctccgtgtacctttctttactatgaataaagaatgattttactac

SEQ ID NO: 1042 - DNA, 3388 bp, Danio rerio
  source 1..3388: mol_type = unassigned DNA
aaagcagtagagatgacgacacatcgcgcagaagttacaacttctggtaagacgcaggaggagccaggcccggaggcaacccacagtgcccagagcctcctagtgtcgccaacacctgctgccggccgctcgcctgctactcaaagctgccctcaagtgacagcagctcataacagtccacaaagcccccaaagtcagcaagtggcagttacaagatctgactgtgttcccttggcacagccaagaatccagtggccccaatcctcaaagaaagctgagtggctccagttcgacaaggacgtgaatcagatcctggaagtgacaggcaaggggggtgtggaccagcgactgtcaacaatgaccacgctcatagtgaacattgcagctgagcgattcggaactgtgacacccaaacccactccatcgacatatactccaagccacagagtaaaggaaatcaaacgtctcaggaaagaacttaagctactaaagaggcagtacaaggcagcaggggaagtagaaagagcgggcctagaagatctgagaggaatcctgaggaaacagctcgtgaacctatgtagggcagagtatcacaggaagaggcggagagagagagcaaggaaaagggcagcatttttggccaaccctttcaagttgaccaagcagctccttggccaaaagaggactggcaaactcacctgctccaaggaggctatcaacaatcacctcaaggccacttattctgacccgaatagagaacaacccctggggccttgcggtgcactgctgacaccacctgagcccacatcagagttcaacatgaaggaaccctgccggagtgaagtagaggaagtggtgaggagagcaaggtcaagctcagcaccaggcccaagcggagtgccttacaaggtatataagaactgcccaaagcttctacacaggctctggaaggccctgaaagtcatatggagaagagggaagattgcccagccatggaggtatgcggagggagtgtacatcccaaaagaggagaagtcggagaacatcgaccagtttcgagtcatctccttgctcagtgtggagagcaaaatattcttcagcattgtggccaaaagactctccaacttcctattgagcaataaatacatcgacacgtctatgcagaagggaggcataccaggagtcccaggctgcctggaacacacaggcgtggtaactcagctcattagggaggcaagagaaggcaggggggacctggctgtgttgtggttggatctcaccaatgcctatggctcaataccccacaagctggtggaggtcgcactggagaaacatcatgtaccccagaaggtgaaagacctcatcatcgactattacagcaagttcagcttgagagtctcctctggccagttaacatcagattggcaccagcttgaggtaggaataatcactggttgcaccatctcagtgaccctctttgcactggcaatgaacatgatggtcaaagcagctgagacagagtgcagaggccccctcagcaagtccggagtaaggcaacctcccatcagagccttcatggacgacctcacagtgacaacaacgtcggtaccaggagcaagatggatcctccaagggttggagaggctcgtggcatgggcacgcatgagcttcaaacctgcaaaatccagatccttggtgcttaggaaaggcaaagtcagagatgagttccgcttcaggctgggacaacaccaaatcccatcagtcactgagagaccagtaaagagtctcgggaaggcctttaactgtagcctcaatgacagagactccatcagggaaaccagcactgccatggaggcttggttgaaagcagtggataaatcagggctccctggaagatttaaggcttgggtttaccaacatggaatccttccaagactcctctggcccttgctaatctatgaggtccccatgactgtggttgaaggttttgaacaaaaggtgagcagctatctacgcagatggctgggattgccacgcagcctaagtaacatcgctctgtatgggaacaccaacaagctcaaacttccttttggctcagtcagggaggagttcattgtggcacggacacgagaacatctgcagtactctggatccagagatgcgaaagtgtccggggcagggattgtcatcaggacagggagaaagtggagggcagcagaggcagtcgaacaagcggaaacccggctgaagcacaaggccatcctgggggcagtagcacaaggcagagctggacttgggagcctagcagcaacccgatacgactcggccagtgggagggagaggcagaggctggtgcaggaggaggtgcgtgcttcagttgaggaggagagaaccagcagagcagtggccatgcggcaacaaggtgcctggatgaagtgggagcaggcgatggagcggaatgtcacctggaaggacatctggacatggaaccccctgagaatcaggttcttgatccaaggggtctacgacgttcttcccagcccatcgaacctgtacatatggggcagagtagagacacctgcatgcccgctgtgttccaagccagggacactagaacatattttgagcagctgttccaaggcactaggtgaaggtcggtatcgatggagacacgatcaggtccttaaatccattgctgaggcaatcagcaaggggatcaaggacagtcgataccgccaagccacggccaaggtcattcagttcatcaaggaaggacaaaggccagagagaacagcaaagaactgctctgctgggttgctctccacggcccgagactgggtgatgacagttgatcttgagaggcagctaaagattccaccacacatcacccagtctacgttgagacctgacataatcttggtctctgaggccacaaagcaattaatcctgctggagctgacggtgccctgggaggagaggatggaggaggctcaggagagaaagaggggaaaatatcaggagctagtggagcaatgtagggcgaatggatggaggaccaggtgcatgccagtggaagtgggcagtaggggatttgccagctacaccctgagcaaggcctatggtacactgggaataacaggcacaaaccgaagaagagccctaagcaacaacgtggaagcagcggaaaaagcatccagatggctctggttgaagaggggggaacagtgggggcagtagcatgccacttggacacaggccggggtctgatcagcctcggtcgggtcgcctggaggagggtgtctgttgcaagacccgaaacaccctgtgagcccaggaaacaacactgatgatgtgtccaaggttgtgcatcaggagatgtttctgtaac

SEQ ID NO: 1043 - DNA, 3595 bp, Takifugu rubripes
  source 1..3595: mol_type = unassigned DNA
agactaggtgacaaccaagaacagttwggtcgactactggaaagacagttggcagctcggaaagacggcacccgggacagtatgggttagcaccccagcctgtatctttcgcgagaaggaacccaaacaagctacggaaagccctacagagaaacacccccaggagatcccgagagggggggaggatgagatctccaatcggacggacctaacgttaatgacccctgcaatggaaatgactacgacagtaacatgtatctgcagcaagctgtgcaagaaccagcgtggcttaaagatccatcaggccagaatgaaatgtctggagcgggaggttgaggtgcaacgcacaggtcctggacctggtgagacgcaggaggagcccggacaggaggcaacccacagatcccagtccctccacgtaccggagcctcccaaccctaacagagtagttcaacagcagcggattaagtggcccccagcaaatagacggagtgagtggctgcagtttgatgaggatgtgtccaacatcatccaagccacagccaaaggagatgtcgacagcagactccaggcgataagtaccatcatcgtcagctatggctcagaaagatttggacggatcgagaagggcaacactgagaccacctcttacaccatgaaccgcaggtcctttaagatacaccaactgcgcaaggagctgcgaaccctcaagaaacagttcaagagagctkctgatggggacaagcaagctttaaaagagctgtataacatcctgcggaagaagttgaaaactctccgcagagcagagtggcacaggaggcgcgggagagagagagcaaggaagcgagcagccttcattgccaatcccttccggttttctaaacagctgctcggggacaagcggagtggccgacttgagtgctcaagggaggaagtgaatcgcttcctccaaaacaccatgagcgacccactgaggggtcaagacctaggacccaacagagcgctcatcagccctgccccaccatcggcagagttcaagctggcagagcctagtttgaaggaggttgaagaagtcatcaaggcagcccgttctgcatcttccccgggccccagtggtgtaccttacctcgtctacaagcgctgtccagaaattctccggcatctgtggaaggccttgaaagtgatctggcgaagggggagagtagccgaccagtggaggtgtgctgagggactttggatacccaaggaggaggactcgaaaaacatcaaccagtttcggactatctcactactgagtgtggaagggaaggtgttttttagcatcgtctcccgaagactgaccgagtttctcctcaagaacaactacatcgacacttcagtgcagaagggtgggatccctggagtccccggctgtctagagcacaatggtgtagtcacacagctcatcagagaggcccatgagagcaaaggagaactagcggttttgtggttggacctgactaacgcctacgggtccatcccacacaagctagttgagcttgcgctacacctacaccatgttcccagtaagatcaaggacctgattctggattactataataacttcaggctcagggtcacttcagggtcagtaacctcagactggcatcgccttgagaaaggaataataacaggctgtaccatctccgtcgttctcttcgtactggcgatgaatatggtggtaaaggcggctgaggtggagtgcagagggcctctatccagatcaggtgttcgacagccccccataagagcctacatggacgaccttaccgtcacaacaacatcagtcccagggtgtaggtggatcttgcagggtttggagagactcatcctatgggctaggatgagttttaagcccaccaagtcaaggtccatggtactgaagaaggggaaagtggtggacaaattccgattctcaatctcaggaaccgtaattccatcgatcacggagcaaccagtcaagagcctgggaaagctctttgactccagcctgaaggacactgctgctatccagaagtctacggaagagcttggagggtggctcactaaggtggacaagtctggcctgcctggtagatttaaagcctggatctaccagtactccatccttcccagagtcctgtggcctctcctcgtgtatgcagtcccagtaacaacagtggaatcctttgaaaggaagatcagcagctttctgcgcagatggctgggtcttcctcgcagcctcaacagcgctgcactgtacgggacaagtaacaccctgcagctacccttcagtgggctcactgaagaatttaaggtggcacgcacaagagaagccctacagtacagagactccagggactgcaaggtgtcatcagccgggattgaggtgaagacaggaaggaagtggaaggcagaaaaggcagtggakgtggctgagtcacgcctaaggcaaaaggcactagttggggccgtggcaacaggaagaacaggcttgggctacttcccaaagacccaagtcagccatgcccggggcaaagagagaaaccacctacttcaggaggaggtccgagcaggcgtggaggaagagcgagtgggtagggcagtgggactccggcagcagggggcatggacaaggtgggagagcgcgttacagcgcaaagttacctggtcaaacatcatgcaggcagacttccaccgcgtccggttccttgtggcggcagtctacgatgccctccccagcccagcaaacctccatgcgtggggaaagagtgagacacccacctgttccctttgctccggaagaggctccctggaacatctccttagcagctgcccaaagtccctggctgatggtcgctatcgctggcgccacgaccaggtactcaaagcagtggctgagagcatagccttggccattagcaccascaaacaccatcatgctccgaagaaggcaatctccttcataaaagctggagagagacctcgtgcaggcccacagataacaacgggactcctccacacagctmctgattggcaactgcacgttgacctgggaaaacaactgatattcccccagcacatcgcaacaacgtctctacggccagacatgatcatcatctcagaggcttcgaaacacctgatcatgctggagcttacagtgccctgggaagagcggattgaggaagccaacgaaaggaaacgtgccaagtatcaggagctggtggaggagtgcaggggcaggggctggaggaccttctacgagcccatagaagttggctgtagaggctttgcaggacgctccctctgcaaagcctttggccgactgggagtcacagggacagccaaaaagagggccattaaakccgcgagtgaagctgcagagagagccacgaggtggstgtggctkaaaagggcagatccgtgggttgctactgggacacaagccgggtcttgatcaccccggctgggtcgcctgggcgagggtgtatgatgtcgtgagacccgaaacaccctatgaacccaggatacatcctgacgatgtgtcccagtgcatccaggagatgtakctttaagt

SEQ ID NO: 1044 - DNA, 3711 bp, Tetraodon nigroviridis
  source 1..3711: mol_type = unassigned DNA
agattggtctggctaagccagtgacgtccaggaacagactggctgacgaccacgaatagagtggtgacagcttggatagacagctgacagcagggaaagacggcaaccggggcaggaagggctagcaacccagcctgcatcttccgtgaggaagaacccaaaacttgctacgaagagcccgaagcaaagatacccccaggggagcccgagagggggggagaatgagctccccaaacggacggataacatggcaacgacccaggctagcgttaaaccgacagcggttgccacatgtgtatgtggcaaaatctgcaaaaacccacgaggtctgaagatccaccagaccaagatggggtgcttggcaagtgtgcaaccagagcagcgcgcaaggttcagcctcagcgagtcgcgggaggtgccagccagggccgagccctatggccctcagcaaccgcattctcctgaggcccttggtgagacgcaggaggagcggggccaggagtcaccccacagtgcccagaacctccgtgctcaggtagcacaagcgccagacaacccacaacaccaccggcgggttaagtggcccccagccagcaaagtgagcgagtggcagcagcttgatgaggatttggaaggtattctggagtccaccgcaaaaggtggagtagacagaaaactccaaacaatgaccacgctggtcatcagctttgccaccgagagatatggtacaatggagaaacgcgctgctccagagaagtacaccaaaaaccgcagggcagaaaagatctcccaactgcggcaggaacttcgggtcctgaaaaagcagttcaagggcgccagcgaggatcagaagccaggattggcagagcttcgttgcacccttaggaaaaaactgcttacccttcgccgagcagagtggcaccggagacgggccaaggaaagagccaagaaacgcgctgcatttttagccaacccttttgggttcactaaacaacttttaggccagaagcgtagcgcccacttggaatgtgcaaaagaggaggttgattcctacctccacgacacattcagtgacgcagaacgggagaacagcctaggcgaatgtagagtgctgatcagtccacctgagccagcctgcagtttcaacaccaaggctccaacttggaaagaaatccaaactgtggtcagggctgcaagaaacaactcagctcctggacccaatggagtcccatatctggtgtacaaaagatgccccaaactcctagcccggctctggaagatcctaagggtgatctggagaagggggaaggtcgcccatcaatggagatgggcggaaggggtgtgggttccgaaggaggagaagtcaaccttgatagagcagtttaggaccatctcactgctcaatgtcgaggggaagatattctttagtatcctctcccatcgtctatcagacttcctccttaagaaccagtacatcgactcctcggtgcaaaagggggggatccctggggtaccagggtgtttagaacactgtggcgtggtgacacaactaattagggaggcgcgcgaagggagaggtagcctggccgtactttggctggacttagctaacgcttatggctccataccccacaagctggtggaaatggcattagcgaggcaccatgtcccaggcccgatcaagactctgatcatggactactatgatagcttccacctgagagtcacgtcaggcagtgtcacatctgaatggcaccgactagagaaagggatcatcactggatgcaccatctcagtgataatattcgccctggccatgaatatgctggccaagtcggctgagccagagtgcagaggacccataaccaagtcaggcattcgccagccccccatcagagcattcatggatgatctgacagtaacaacaacgtcagttccagggtgccgttggatcctccagggcctggagaggcttatgacttgggcccgtatgcgctttaaacctggaaaatctaggtccttagtcctgaaggcagggaaggtgaccgaccgcttccgcttctacctgggaggcacccagattccatcagtctctgagaaaccggtgaaaagcctaggtaaaatgttcgacggctccttaaaggatgccgcttccatcagggaaaccaatgatcagctggggcactggctgacgttggtcgataagtcaggtcttccggggaaattcaaggcatgggtataccagcatggtatcctacctaggatactgtggccactgctggtgtatgaatttccaatttccaccgtggaagggcttgagaggagggtcagcagctgcctcaggcgttggctgggactacctaggagtctgagcagcaatgccctctacggtaacaacaacaagctgacactccccttcagcagcctggcagaggaattcatggttaccagagctagggaagttctccagtacagggagtccaaggatcccaaggtagctcttgccggcattgaggtgcggactggcagaaggtggagggctcaggaggcagtggaccaggcagaatctcggctgcaccacaaagagcttgtgggagccgtggcgactggccgtgcaggcctgggaacaacaccgaccacccacctcagcaggctcaagggcaaggaaaggcgggatcaggtccaactagaagtgagggccagtattgaggaacagcgagctagtcagtgggtggggctgaggcagcaaggcgcttggactaggtgggaagaggccatggccagaaagatctcatggcctgagctgtggagggctgagcccttgcgcatccgcttccttattcagtcagtttatgacgtcttgcccagcccatcaaacctcttcctgtggggcaaggtggaatccccatcatgtcccttgtgccagggaaggggcaccttggagcacatcctcagcagctgtcccaaagcacttggagagggtcgctatcgctggcgtcacgaccaggtgctgaaggcaatcgctgagtctatcagctccgccatggagtacagcaagcgcctacccttaccgggacgcggagttaggtttgtcagggccggtgaacaacctcctccccaaccaagggcccaaccaggcctccttgcaacagctagggactggcaactaagggttgacctggggaaacaattaaagttcccggaaaacatcgtagaaaccaacctgaggccagacattgttctgcactcacagtcgtccaagcaagttattttgctggagctgactgtgccctgggaggagagaatggaggaagcgtatgaaaggaaggcagggaagtacgctgagctggtggaggattgccgcagagcagggtggcgcagtagatgcctgcctatagaggttgggggtaggggctttgcagggaagtcactctgcaaggcctttagcctcctgggcatcacaggcatgcgcaggaggaaagccatctgcgcggcctcagaggctgcagagagggcgtccagatggctgtggatccagcgggacaagccgtggacgagcgcttcttggacacaggccgggaactgatcactcccagtcgggtcgcctgggtgagggggtctgatgttgaaagacccgaaacccccgatgaccccaggtactatcactgacgatgtgtccaagacatgcatcaataggtgtatttagaaatc

SEQ ID NO: 1045 - DNA, 5304 bp, Schmidtea mediterranea
  source 1..5304: mol_type = unassigned DNA
aaacgacatcatgaacgcttggccgcaacaatccagttatccctgcggtaacattgtggaactcataagacaagtactaaaagaagaattagaaaaattagaagaaaaaattgaaaataatttatttataaaatttaaaaatttaaataaatttaaaaatttaaatttaaatttaaatgaagataaaaatttatttaatccaataaataatcaagaaaatcaagaaaatgatggattcaagacaattaaatactccaaaaataagaaaatatcagaacccaaaaatgacaaacgacatcatgaaaagctacaactacgcggttttgagcgatgtcacgcctcaagaaaccactcaaacaacaacccacttaaatgtcgatatagacaatgaaaccacccaaccaaaacagccacttacgaagtctggcaaaccaaaatctaaaccaattgcggtatcatacaaatttaaagatgccaccttcatctgggacactaccccacaaacaaatccaccaagagattgcaccaaacttattgataaaacaagaccaagaaagaccatcttcaaaaaatcagcatttcaaagctacctcaaaaaagaactgtccaatgagacatttgtggaagtaaaaaccttcctcatggcaactcacaaatatcgttttaaagacgaaaactcaagactcttggcataccgaataattaatcgctatgtcatggagacagcaaatgaattcaaagaaaccgaatttgacatggctcgctttgccaaattcttcacaatcccagagaattggttaaaacatctaaaaccatactctacagctaccgaaacatcaccggctgatagaataaaagtacaaaaattagtggatctcacatgcagatacccattcaaaactcaagaagagcaaacaagtgtagcaaacttcctacacttcttcacccaaagatcaataattggaatctcaagagattataaattccaaaaatttataccatttatggcaagaaaaaacaccaggccggagacaacctccactatggttacgacttctccaacagaacaaaacagactaccaatggtaataatcacaccacttgaagaaccaaaaagtgaacatcgtagaccagagaaaagaggcgcaagcaatgacacaattgtgcttagcgacgaagagttcccactacttaaaaggagaactcttccaaccagaaaatccaaaaatcctactggtgcaggaaatgtaccwacagaaaccgaatgcactgatgaagttaaattcatcctcaacaatgaataccaaatagaatgtaaagagtgtggaaaagtgtgggaaaacgtacgaaatggattaaaccaccttcgtcaaaaacacgatttcccaaaccgaacagatgttatggtatcttgcgtaagatgtgaagtaccgatcaaaggagcagaatgtgtaaatcacattaaaaatcacaaaaaagatgacaaagaagaaagtgaagcsgggagtcttgtggctaacactcaagacatcccaaatgaaagtagctgactgtcacaagccgcaatcgaagtatatctgaggaatattctgaaaatgaaagaaaaccaggaaaggaatattcaatatcttgaacctagtactgcgaatttcctcataaataggaacctcagagcattttatcaaaacgtcaaaatcgaaaagcttatcggatgggaacaagtcatctggcttatacattggaacaaatgtcattggattgtatacctagctaattgcgactcaaaaacctctgttatcttggactctgacaaccaaatgacattacagcaaagatgtaacataaaagccaaatttgacaaattcctagaaggtacctttgaagaaaaaacagtgcttggaaccctagaaagaaaagttcctcagcaaccaaacaacttcgattgcggtatatatgtgatacaatacatcagcgactttcttaaagacccacaaagaatagattatcatacacccgactccaaaagaattagaaaagaaataggagaattaatattagaagaaatgaaaaaccctgcctcaaaaatcaaaaatccaaacaaagaaatacaatctttactccaaaaattcagactactgcaaatcaatgtgaatgatgtattccattggtttgcggctgaataccaaaaatctctaccgaagatacgtaccaaaagagatggaaaactgaataaactaagctgctcctatcaaatccaaagattatttggtctagctcctaaaagagcagtcaaagaaatatatttccaagaaacctctacagcagacttggaaacaagagttctaaatgaacatttcaaaaaggatgaatcaacgatgaaagaatgtaaaataaaaaatggaaaccattaccaagactggataacaaaggcccaaattgataataaagaaatattggaagccctaaaaaacagtacagattctgcccccggagaagataacattcctctgaggcaatggataatctggaacaacgacggtgtcctctttgatatgtttaactacatcaaaaggacacacgatatcccagatatgtggaaaaactacaccacaacactacttataaaacccggaaaaagccaagaaagcaacatccccgctaattggaggccaatatcgatattgccaacaagctatcgtatatttatgaaagtcctaaataaaagagtactagaatgggctaatagaggagaactgatatcaaaatggcagaaagccgtagacaaagctaatggatgtgatgagcacagctatgtcatacaagcgcttatcgaaaaagcaaacagaagctactacaaaaacgagcaatgtcacctcgccttcttggatttggcagatgcttttggaagcatcccattccaagtaatatggcataccctaaaaaatatgggtatggatgaggaaaccatcaacttgctcaaagaaatctacaaagattgctccacaaaatataaatgtggaaagaatgagtcagaaaagatcaaaattacgaaaggagtccgacagggatgcccattgtcgatgaccctcttcagcctctgtatacaatatcttatacaaggcatagcagaaaagaaaaaaggagcaacaattgcaggtcaagaagtttgcatattggcttatgcggacgacctagtaattgttgcaaacacagcaaaagacatgcaaatgctgttaacaacaatcgaaaatctggcaaaacaagccgatctcatattcaaaccggcaaaatgtggatattacagagacccaagagataaaaagtccatgatgaagatatatggcaaagaaatcagcatagtagacgaaaagaatgtttacacctacctaggtgtaagaatcggtgacacaaagaaaaaagacctaaatgtcagattcgaagaggtcaaaaagaaaacgacagcaatcttcaaatcgaaattgcgaagtgaccaaaaactagaggcatacaacatcttttgccaatcaaaatttgtgtacatcctacaaggcgaagatatcgcaaaaaccaaaattgaaacttacgacgaagaaatcaagaaaatgataaaagaagatatattaaaattacaagacaaaagtccgttcacagacttcgttatctactccccaagagaaaaaggggggttaggaataacaaagataatagatgaacaaacaattcaaactattaatagaacggcaaaactcctaaatagtagccatagagcaatccgggctattatttatgaagagctaatacaagtagctaacctaagaggagaaaaagaaatcaacaccattgaagaagcactaaaatggttggaaggtaccaacaaatacaaaaagaactccaacgccaagaccacctggataacaagggttcgggaggcctttcaaactctagaaaagaaacacaaaatcaaggttagatttgtgcccaaagaaaactgcattggatataaaatcaaatgcgacacccaagaaaagatagtggagcttgataactcaaaagagttatcaaaaagcttacactggatgataaaagaggcatattataaagaatggaaagccctaaaatgccaaggatatattataagcctaaaaacctccgaatttatggagtggaaaatgcccagaggccttccggaccctgattggagattcctaacaaaagtaaaggcaaatatgttggacgtaaacatgaaacaagccaaccagggaggaaggttgggaagcacaaaatgccgaaaatgtgaagataaagaatcggcaagccatgttataaaccactgtgcctcaggtaactggagtagagtggaaaagcacaaccaggtgcaaaatgagctagcaaaagaactgacaaagcggaatatcagcttcgaaaaggacagcatcccaaaagaaacaaaagagagcctaagaccagatttggttataagactcaaagacaagataatgatagtggacatcaaatgcccatttgatgaggaatctgctatcgagagtgccagaaacaagaacatagacaaatatcgagaactggccaaagagatccaagcaaaaactgggttacaaacaacagtctcaactttcgttgtctgttctttgggaacctgggataagaggaacaacgagctcctacggcagatgggaataagatatgaagaatccaaagagatgaggatcaatatgatccaaaaagccatccacgggtctagaaaaacctacgaccaccacagaaattttaacaatggttaaaatggcaaaaagatatttcaagatgaattgtggactcatctaaaaaatgaccaccttgagtccaaatatgcctagctatcatggttgctgatggaaacagtaaggcacctgatagctaacttttcactgtgaatatcttcagatattcacagtgacacgaaaggacaccactagtaaaaaccactagttttttctgacacctcttgctacaaactctgtaaaaatcaaaaggatcgataggccgcgctttcacggtctgtattcgtactgaaaatcaagatcaaggaagcttttccccttttagtcaacaccaggtttctgtcctagttgagcttcccttgggacatctgcgttaccatttgacagatgtaccgccccagtcaaactccccacctgacactgtcctcaaaacagttcaattgcatccgaagatcgcaattttttcactaaaataaattaacaaaagttaattatactgcttcattgagtaagtagaaaaacaatc

SEQ ID NO: 1046 - DNA, 6343 bp, Caenorhabditis brenneri
  source 1..6343: mol_type = unassigned DNA
  misc_difference 1436: note = a, c, t, g, unknown or other
aaggacgctggtttaaggccgaattcgttcgttctttttctggcggtcttgctttgagcttggtttccgatcctatgcccttgwgcatcagcgattgcgttcatctggtctcggccgaaggagatacgatgaacgggaggtccacttgtgggccattgtctcgttcatcctctgtcgtaagtaggtcgaggtcttccccttcccccagtgttcccccccacccttcccccagtatcggtccagatacaggattgtcggctggaatcatcggcacatcgagaggatgtagcctttggttgccagaggtggacaatgccttatcacagtggctgagaaaagggttggaacgagaccatgaagttctggtttgtggatttgaggcagcaaagccactgtcactttccaaagctagacttctaagaaagaccccaaggaacactggtgtggttaggcacatattagaatttgacggaaggttagttcatactaactgtaacgagaccgagtgtgttctttctactttgtkcagtgamgwggctgtcgaagtagtcaggatatctctcaaatgtgaaccccgtgaaccctgtgaacccaaatgtgttctttctattttatgcagtgataagatagtcwggatatcatttgaatgtgaaacwcgtgaaccttttcctttcttcmcggatcggaaattcagagaacctattcctttcgttttcgagaggatgtatgacccaagagaccctattccttcatttatttgttggatgtatgacctgagacaaaggatgacccctggcacsttgccaagwaatcccctttctcmagagaacaaagacagctggggacgcccagctgtcataaagaatgagataagatctatgagatcttatctcgaagagaatgtgaaggaaaaccgcctgaaccttttgagaaggttaagaggtggtggtgaaggaaagaagatgatcagaaagttggttgcagaaaagaaaagcgacacagaggctgtctgcaggatactgtacccacttgatgatcgttatgagtgttttgttgatggttgtgagacaacatcaacgatgggatacgggtctagtgacctgaaatacatgaccacacacataaagaaagagcatggtgtgaaagtccaatggacatatgagtgctccctgtgtaataagcaagctcctttcatggggggagctgcgtccaagtgggttacagcgcacatggcaacaaagcataccgaaacggtgaagttgaagctcaaaccaagcatctcgactactgccaaggttgctgcgaagctagatgagatcgccgtgtcgctacccaaaccgagacaagtacgtgtattgagagacccagatgaagtgaaagagaaggttgcaaaaccaacacttgcttccacgagagaagaagtgaagagaaatgcnttgcgaaacatggccccactagtcgaactgagttctcagaatcagttgacwggagccgaaagacctgaggaaactagtgaagctatgcgactcgaggagtgtaggactccagagaagattgctgaactagaaggaaagatacagacccgaacagtgactaaaaagcttagtgcactgaaagagtcaatggaaaagagaacgagagaggagaaggttgggaaaccatcacttgctccaattcatgaagaagtgaaaaagactgcaagacggagcttggcacctctagttgaaccgagtacgttcactcatttgactggggcgtcaagacttcaggctgttcgtgacgcgttctcgaaagccaacaaagacgctgcggcgaaaagaaggtctagcctggcgaaaccagctagattatcagagattatgaataccaccttcacgaaggagacggtaaatgagacgaaagaacctgtgaatgatactgacgagagtatcgcaacaatccagccacaagtacgtgtctaccggtttaatacatggtgtctcgatcatgaaaccacgagagaagcctggttaaccggagaagttgtggattggttcatgggaaaagtgactgagaagaaagaccagtacagagtgtttgactcacttgtatggtcaatgtacaagttccatggtgtagggtatgtattggatctgatgagggatcctctaacatacttcttaccaatatgtgaacacgatcactgggttttgctagtgattgatgagaaaggaatttggtacggtgactcgaaaggtgcagaaccgtgtagagaaatcgccaaattcatagaagagacgaaaagagaaagacgaatgttcccagtccccgtacctcttcaaagagacggagtgaactgtggtgtacatatatgtctaatggttaaatccatcgtgaatggcgaaccatggtacaccgaagaagaagtgaaagtgttcagaagaaatgtgaaaagaggtctgaaagaatttggttttgaactttattctgaaaggatcgtctatgtcggagatgacagcataaaagtgaatgatgagcatgatgatgacgtggtattcctctcggaggagacgaataacactacgttcacgatcgagcaagcagaagatccggctgaagaggatgcccagcatctggagagtccggtgaaacctgtaaagctcatggagttgaaaattccaaagattgagataaagaagaaagagattcggagaaaaccgaaacaacaaatcgaaaagaaaagaaaggtgccaacagggaaaccagatgaactgttggtcagagtgcgattatggttggaaagagaagtccaatcatacttcgactctggaaagagattccaaagactggagtggatattagatgtcctcacggctgcgattcacaaggctaccgccggtgatgagcaagcaattgaaagaattgagaagagatcaccccctttggaagtggaagagggtgaaatgtctacacagacagaaccaaagaaaagagaaagaaaagaaaaggagtcaggttgtgaaatgaaagcttctcacaaggagatgtacttcaaaaaccgctccaaagcgttcaatgtgataattggaaaagactcaaagcaatgcgagattccaattgagaccctgcaaaagttctttgagggaacaactgcagaaacgaatgtgccagcagaagtgctgaaagagatgggttcacgtctgccaaagttggaggcgttggactggatggaagctaatttcattgaaagtgaagtgtcagatgcgatgaaaaagaccaaagacaccgctccgggtgtagacggactacggtatcaccatttgaaatggtttgatccagagtataagatgttgacacttctctacaatgaatgtaagaaccatcgaaagattccaagtcattggaaagaggcagagacgattctcctttataaaggaggtgatgaaacgaggcccgacaactggagacctataagtttgatgcccacgatctacaaactgtattctagtctttggaaccgaagaattagatcagttggtggtgtgatgagcaaatgtcaacgaggtttccaagagagagaagggtgtaatgaaagcataggaatccttagaacggctatcgatgtcgctaagggaaagagaaggaacctgtcagttgcatggttagaccttacgaatgcgtttggttcagtaccccatgaactgataaaaagtactctggaatcgtatggattcccagaaatggtgacagagattgtcatggatatgtacagaggtgcatcaatccgaatcaagagcaagaatgagaaaagtgaacagattgttatcaaatctggagtgaagcagggagaccccatctcccccacgctgttcaacatgtgtttagagaatgtgataagaagacatctggatagtgcttcgggacacagatgcataaagacaaaagtcaaggtcctggcttttgcagatgacatggccatactggccgagaacagagatcagttacaaactgaactaaacaagttggacaaagaatgtgaatcactaaacctcattttcaaaccggtaaagtgtgccagtttgataattgagagaggaatggtgaataagaatgcggaagtggttctgagagggaagccaatcagaaacctagatgagaatggttcctataagtacctgggagtacatacaggaatcgcaacaagagtttcaacaatgcaattgttggaaagtgtcacgaaagaaatggatctagtgaatcagagcggcatggctccgtttcaaaaactagactgcctaaagacgtttgttttgccgaaactaacgtacatgtatgcgaacgcaatacctaagttaacggagcttaaggtctttgcaaacttgacgatgagaatggtgaaagagattcatgaaatccccatcaagggatctccgttagagtatgtacagctacctccaagtcaaggcggattaggagtggcttgtccaaagataacagcgttgattaccttcttggtcaacgtcatgaaaaagctatggtcttctgacagttacatcagaaaactatacagggactacctggatgaagtcgcagagacggagacaggtatggaagagatgacgaaagaagatattgcaaaatatctgagtggtgatgtgccgatcgacaagaaggcgttcggttacaacacmttcacaagagtaagagatgtgtgcaacagcctcactaasatagkgggagctccactgcacaagttaaagattgtggagagagacggtgactttgccattctagtgcaagccaccaaagaaggaatggagaaaatcttcacctgtgctcaggagaagaaactccaacagcttctgaaagcagaagtmaacacggctctagcgcaccgtttcttcaccgagaaaccmgtgaaaagtgcagtgatgagtgtaatgagacagtatccacagagcaatgcctttgtgaagaatggaaagaatgtgagcattgctgtccactcgtggatacacaaagcaaggttgaatgcgctgcattgcaacttcaacacgtacggtgaaaacaagtcaaaagtgtgccgacgttgcggcaaagacgtggaaacccaactgcacatcctgcagwcatgcgagtacgggttaccaaagctaatcaacgaaagacatgatgcggtgttacatgtggtgagaaacctcatccgcaaaggctcaaagaaagactggaagctaaagatagatgaaactgtgtcaagttgtaatcaacttcgtccagacatctatatgtgtagcccagatgggaaagaggtcataatggcagatgtaacctgtccttatgaatcaggaatgcaagctatgcaagagagttggaaccgaaaggtcacsaaatacgaaggaggctttagccacttccawaagatgggaaagaaattcacagtgttgccaatagtggttggatcactgggaacgtggtggaaacccacaacgaacagcttagttcaactaggcatagagaaagasacgataagaagagtgatccccgagctgtgctcaatgaccatggaatacagtaaggatgtctactggaaccatatattcggggacaccttcaggaagccaccaatgagatttggtgtagagaagccaaagggtaatagttggaagaaggaaggcagcgagccgaaaggtgctgcttcctccgactaaacccacacgagamctacgacgccataagatcaggcatgtacggatgtgaatgagactgatgaacggaatgagcacgtgcccataagatcgggtatkaaagawcagagacgatccctamcatcgggaaaacacgagttatactgcttcactgamctcgctaagctctcataatgaccgaacttgttcgcaactgcctcctaaccgggcgggtgtgagaagggaggtcgccttgaggcggacgcaatgagggatgtgtgcaggttccccctcttgagatccgaaagtctaaaagtactagaccgaaagatcgaggacggacgggatggccgcgaggcacacggcgggtaacacagccagataacctagtagatcttcggatctcgtcggcctggagatatgtggaaccctgggaaaggagaaagttgtttgttgggctggcaagagtgaagtttgaatgtgaaccaccgtcatgcaaccactaaaccagtggcgatgcgggtggagtcatcacaggaaaatgtttctgttgcttgacttatcagtgtttgatatcgccctcaggcacaagtatgaaggcccccacccacataaactccctagcaactggtagtccagcaagcgctggtwcttgctactattgcgccccaggctcgccc

SEQ ID NO: 1047 - DNA, 7751 bp, Caenorhabditis japonica
  source 1..7751: mol_type = unassigned DNA
gcgccccgggttacattgtcggggccacctttctcttggagtagagtacagtctactaattttttgataagctagtcgggtccgaaccactagagtttgcttgaaaatgcgtcaaaccagcattttagaactcgcccaaaagttcggccccgacccccaaacaaatgggaccttcttgacgattttccctgaaaatcggaggatggaatggtcccctattcttgtaaatagkactgtgcaataccccttcgtcatctgtggggaacagatgacacgtgacgtcatccgtgtagacgtcacgttttcccgtgcctgcgggagcccccaatcgagcaatttttgctcttttgagtgtctggaacgcttgaaaccccagacaaatcaggcccagtcgtcggaaaatttctttttgaaattttttggcgcctgcgaaaaaaattttttaaccgccacaaacccccgggaggcgcggwtagggatatcgatgtcatcgactcgtcggtgatctttgattttctctctgcgtctcctattttggaacagtctcgaccaaaaaaccgggcctggcaacccaccgaatccggatgtcggagggatttggcaagaaatgttggaaataacgaaatttcgttattttcagcacaattgtcaaaccggcaagaaaactggatggacaagacacacaatttaccggaaattgtgcttgttacgtcgaatttcccaattttgaaaaaattcctcgttccactggtcgggacgcgaggtcagacgatctgcacgtctgaaacccaaaatcttcggattttatgcagtagtggcgccgcccggctcccaaacaaacaaaaaattcctcgttgcaccatttggggcacgaggtcaaacgaattgcacgtttgaaacctggaatttttgaattccatgcaaaaccaaaaaattcctcgttgcaccatttggggcacggggtcaaacgawttgcacgtttgaaacccggaatcttcgaattccatgcaaaacmaaaaaattcctcgttgcaccatttggggcacgaggtcaaacgaattgcacgtttgaaacccggaattttcgaattccatgcaaagccaaaaaattcctcgttgcaccatctggggcacgaggtcagacgaaattcacgtctgaaacccggaatcttcggattctatcaaaaatcaaaaaattcctcgttgcaccatttggggcacgaggtcagacgaattgcacgtttgaaacccggaattctcgaattccatgcaaaaaaccggataaaatccggtctaaaagtgacgtttttgtcagatcttwctgctcacgctggtgcgttggcgtgtagcagatttctggcatcgacacttaaaacggagcactgccgacaaaaaagcttcaagccagtcggttttctgcttcatttcctaaaaaattcctcgatcaacgaggtggcgtctctccgcaacgtcaaaaaaawktttcttgaatttttctcaggaaaacctatcggtgggatggcttctttcagtagaaccaaaataacttttttcaaactttgtttgaagaattttgttttgtctgctgaaaatcccccgataatccgccaaaaaacaaaccaaaacaaagcgagccktgtccaaatcgcaagaggaggtcatctgtcagactgtctkccgtcccaaaagatggcaggagttctcggacgactatttctctcggttcagagcactctctcgcaccgccctttcgacacgttattgcggagcgatgacgacaaaagagggaggaaaacgatcaaactccagttttttattaaagaaaatctggtcacacctktggttgctagggacgtgaaaattttaaamaaacaaacaaaaaacaattctgggaactctgatagcaacagtgaaacaaaaaacttctctaaaaataaagtttccagacaaaatggcccattgattgggggcggtaaccacaaaaaaatcggagaaaaccaaatcacacgcactttggaaattgaatccaaaagcgatgacaacaaagttttggtcctccgaatactgtacccaactaatgattggtacaagtgttactcccaatggtgccaacacaaatcccttgttggatatggcgctcacgatttaaaatacttgacagaccacataaagtccactcattctaaaaaggttgagtggtcttatcagtgtagtatttgtgacgcaaaagccgaaggtaccggtacaaaagcwgctagatggattacagcccacatgccaaaagtacacggtattgaagcaacacacagaattaaacaaaattctgaaaaaacaacaaatgttaaaactgcgaacagtctccaggaaatggcgctgtcgctccaaaaaccaaaaaatggtccgaaaaaagttgtaatggcaactagtacgaccccagaaaagaaaatctctgaactggaatcaaaaatccaaaccagagaagtggccaaacaattgagcgctctgaaggagtcagctcaaaaaaatcagcaaggaaacaaaacaaaaaatgttaaatcaagcttaaaaacaattgctgaaaacacaaatgaaacmaaaaagatwagcgctcgaaagagccttataaactatctgaaacctgaggatgtgctcaatcacattccaaaggagccaaaaccagcttctgcgaaaaktggcctkcaagaactgactggtgctcaaagactgcaggaaacmagaagaaggtttatggcwggaaacagaagagattcaattgcaagaagagaaagtctgtctctcggcaaaatctcaaactcatttaaaattgagctgaaaaatgctccggaaaaaacaactcttaaaaaaccggctgtcactcagaaacaaaacacgagtcagaatgtatctagttctacggttgtaaaagagaacaaaacaggaaatgacgtgatcacaattgatgacacagaaactgttaaaagaaaaataaacacttggtgtctcgaccacgaatccacagaaaatgcgtggatggctgacgacatcatattctggtacatccagaaacagattgaaatcagtttggacaataaaaagttcaaagtgattgatccactcatctggaccacatatcgaatttatggtgtcgaatgtgtccaagatgaactagttggatttgaaaaatacttttttccaatctgtgaaaatggtcattgggttttgctgattatcgatgacaaaagagtctggtacagtgattccctggccgataaaccaattgaggttattgaggacctcataaacaaactaaatcgaacccaaggtaaatttaaccaaacggttccaaaacaaaaagacggctttaattgtggagttcatgtatgtctggtggccaaatccgttatcactgagaacttttggtacacagaaaaagacgttaatgacttcagaaaaactgtcaagctttggcttttcagtgaagggtttgaactctattcagagccgtacaaacaaatccaaaacaaaaacatttccgttaattcggaaaaaaatcaaatcagtgataatgaaaaaaattggggtgataaaactcaaactgtgaatgagagtactctgaaagaaagagatgaagacatctttttgctcagaccacacatcagtgttggagttgctctcaagacagaagacgagaaaaatcaaaaagctgaaaacttgaaagccccacaaaaactctgaaacacggaagaattccaagtggacaaaaacgagaaaccagaatctccaaatgcccaggaaactccaaaaaacgagccaaaaatggttccaagtccgaagaattcggaaaaagaaatttctactgagcttctggatgctcaagaagccggagaagagctgaaaagcgatccgaaggctgaaaatcctgaaaacctgtctcaaaaagctgacggcagtgaagggaaaaccggaagagacggaaagagccgccattccaaacctcatggcaatcaagctcaagacgcctccaaaagttgaacctgtaagaagaaaccctgaaaagggtgaaaattacmaaaaaagtcagccaaacaaaaagagacaaataccaaccggaaaaccggatgaattggttaaaaaagtccgagaatggtttgaaattcaatttcaagcatattttgaggacggaaaatccttccagaggttagagtggwtgacaggtttgctcacggctgcaattcacaaagcttcggctggagatgagcaagctgtgggmaaaatcatcaaacgttgtccacctctggaaattgaagaaggggaaatggctacccaaactgaaacaaaacaaaaaccaaaaaaccaaaagagcacaaaaggagcaaatagttccagctcaattcgggaagcctatgctgaaaaccgagcgagaaccttcaacaaaattattggaaaagacgacaaatagtgtgaaattccaattgaaaaaattgaaaagttcttcgagaacacaacttcaaataccaatgttccaacagaaacactagcgaggatcacttctgatcttccaaaactcgagattggtagttggattgaagaagagttcagggagaaagaagtagccgaagctcttaaaaaaacaaaggatactgccccaggtgtagatggattacggtaccatcatctgagctggtttgatccaaaaakgaaactgctcacaaaactgtacaacgaatgcagggagcacaagaaaatcccaggtcactggaaagaggcagaaactgtactcctctacaaagggggggacgagacgcaggccgagaattggcgaccaatcagtctcatgccaaccatctgcaagctatactctagcctgtggaacaaaagaataaaatccgtgacaggtgttctgagcaaatgccaaaggggttttcaagaaagagagggttgtaatgaaagcattgcaattctcagaaccgctattgaagcggcaaaaggaacaaaaaagagcctgtcaattgcttggttggaccttaccaatgcatttggctcagttccacacgaatcgatcgaggccacactaattgcttacggttttccgggaatggtaaccgaggtaataaaagacatgtataatggcgcatcgattcgtgtaaaaacaaaaaacgaaaagagtaaacaaatcctgattaaatcgggtgtaaaacagggtgatccaatctcacctactcttttcaacatttgccttgaaagtgtcattmgtcgccacctaaaaagcgcggatggtcacaaatgcatcgamtcaaacatcaaattattggcgtttgccgatgacatggcaatcctgtcagattccaaaacaaaactccaacaagagttacaaaaaatggatgatgactgtacaccgctcaaccttatcttcaaacccgccaaatgtgcaagtctgataattgagtggggaaaagtacaaaaagatcaaaaaataaaactaaaaggtcaattcatcagaagtttggccgaacaagacacctacaaatatcttggggtgcaaactggcatcgaaacgcgcgtttctgcaatgcaactgatgaaaaaaackgtcagcgagcttgacaaaataaattgctctgcactggctcmwtggcaaaaactggacgcagtaaaaacttttgtgctcccaaaaatgacgtacatgtatgcaaatactgtaccgaaactctccgagctcaaagagttcgcaaatattacaatgagagcaataaaagtaatgcaaaacattccagtaaaaggttcaccattggagtatgtacagttacccattggaaaaggtggactaggagtggcatgtccaaaaacaactgcgttgataacctatctggtttcaacaatgaaaaaattgtggtccactgatgactatatcaggaaactacacacagactacctgaaaatggtggccataaaagaaacgaaaacaaaagaggtcacactagaggaccttgcctcctacctaagtgatgataaaaccgtctgcaaaaaagcggttggttataattcattcacaagggtacgagaaatctgcaaaacgctatcaaaaaacaaaggagcactgttaagccaactaaaaatcattgcaaaagatggaaagttggctattctggtacaggctstgaaagatggcaaaacaaagattttcacgcatgaccacgtgaaaaccttgcaaaaasttcttaaaaaagaaataaatgaagcccttctgcacagattcacaactgaaaaaagagtgaaaagcgaagtggtgcgagtggtccaagagtacccccagtgcaactcctttgtcagagatggaggaaaagttagcattggagcgcatcgctttgtgcacaaagccaggttgaacctgctcgcgtgtaattacaacacgtggcaggatgcagccacaaaacaatgcagaaggtgtggatatgaaaaagaaacccaatggcacatcctctcatcttgcccaaaaagtatgggaggaaaaataactgaaagacacgattctgtgttaaaaacagtaaaagagatgattcaaactggatctctcaaaaactggaaactaaaacttgatcatgaattgccaggatcaaccagacttcgcccggatatctatttgagaagcccaaatggatccgaaataattcttggcgatgtcacaatcccgtatgaacacggaattgaagctatgcaaacagcatggcagaaaaaaattgaaaaatatgaagagggcttcaaataccttcgttctaccggcaaaaaactcacaattgtgccaattgtggtcggagcactaggaagttggtggaagcccacaacagacagtcttgtcagtctgggaatcgacaaaaatactgtaaaaagagctattccagaaatttgctctacagtactcgaatacagtaaaaacatttactggaaccatatattcggggattcctaccaaaaagtacccatgtttttcggcggtgaaaaaccaaaggggcaaagttggaagaaagtgaagcctcctgaaggcaaaactgcttctaaccatgagcctccaggttaaaagccaaaagccacggagcatcgggaaagaaaaatggaaaaggactgaaaacgagactgaaaaatcccaaacaaaacaaatccaaaacaaactgaaaaaaaaaaaaaaacaaaacaaaaactggacagacactggaaacagtgtcaggcaaagtcgccgattatactgttccacgccttaaaagtcccgaaatggcgcaaaacaacctgaatctatctgaaagtgctccaaaccacgcacaactcggagaaaatcagggacaagttgcttcacgcaacgggctgggacaggtaccccctcctgaaaccgcgaggttgaggatggacgggaaggccgcgaggcttatggcgggtaactcggttggtgtgctagtagatgatttatatccgacagccccaactaagaggaatcctgggaaaggaaaacttgaaaaagtttttacagggctggtaatagttcagcacaattgtagtctactgtcttgcaaccacaacaaaccagtggttctgcgggtagatcaaactataatttgtgtgttttcttttacttgacccgggcaacacattataccacgtccacaaggacgaattcataatggcccctccctaaataaactccctagcaactggtggtccggcgaagccggttcttgccactattgcgccccaggctcgccc

SEQ ID NO: 1048 - DNA, 6064 bp, Caenorhabditis remanei
  source 1..6064: mol_type = unassigned DNA
cgcgaaccagtcatatgacagtctttattgatcgcggtataggcgagcgaggccagatggccgtatgtagcctccaccgttatttttcgttttcacctttttcccccatccccccgtatgtaaataatggatcgttcggcgaaaatggctgtggcacagacaaatcactgttgcccgtcatagaagttgttgttcgtgaagttaagataaattggtctgagaatattttggtagtagagtgtctgataatggtaaagagcggagaaagagtcgttgtaaagagacaaaatctggaaaaagttattcagaatttggcaagaatcaactcaactctattttccaatctaggaaatcagatattttgcgtagtacccagaataaaagacagtaccaataaagagcagggatacaggaaagagaagcaawtgaaattccatgtatcattccgaagtataaaatcccaagttccaccatatttgagaggtgggggagatgtaatggaagatacagagataagaggtatcagaaagttggagccagaggctcagttagacagctcaaaaccgctgatctgcagagttctctacccaacgcaaggttatatgtataaatgtttttatccaaagtgtaaaggacatagtaatggatcaacagatctgagaagtctgaagaaacacatggtggataagcatttcacgaatattgaatttgcatataaatgtgctacgtgtatgtttttaacgactgggaaatcggccacagcgttaaaatcaataaaggcacatatggcaagtcaccacaaggtaacgatggaacccggtaaaaagagtctcgtgcaaaagttgaatgccagactcgaagaagctgctccatcacttccaatgccgagaaatcgatcaaaggtcatacagttgacccccgagaaatcgatatcggaattggagaaaaagaagcaaactcgttctgtggcaaaacagcttagcacactgaaagagtcggcacagaaaaaggaagaggaggtgaagatagcggaggtcaaaaagagagaaccccgtctatcaataatcccagagtcgaatgtcaggcgaagtctggcggcaggactcgaacaatgtataaaccctgagcaatcggtagctcagaggataagagaaaaaagagaagaatacgccaaagcttctagggaggcagcggcaaaaagaagatcgagtttggcaatgaagccagctagattaccagacaaagaaaacgagattacactccaggaaacgaaaaagatcgatgatccaatcgttatagacctggaaaaagaatgtattctcactacagtacttcaagtcccaagaaaccagttcaactcgtggtgtctagagcatgagacaacgattgacgcttggttaacggatgaggtaatacatatgtacatgtgcacaataaccgagaatcgaaaatattttatggcaatcgatccggttctgtggccagtctatgtgagaaatggagcagaggatctactgaggcgtactagttgcccaggaacattcttctttccaatttgtgaaagtaatcattgggttctattagtgatagaacacgatgtgtattggtatctggatccgaaaggcgaggaaccaaaaggaaatgtagagattcttttagagtccatgaaaaggaaaaggcagtactatgaattcccaccaccctcacagagagataatgtgaattgtggagtgcatgtctgtcttatggcaaaatcaatagtagatgaatgtggttataattggtattctgaagaggacgtaaggtcattcagaaccaatatgaaggacattctgaaaagtaagggatatgagttatgtcctgagccttataataggcaaaatttattaaaaacagaaaaacaaaaggaagttattctggaagaaatgatcgattcattcgttgtagaagacgatatgacgttcacagtgcatcgggattctgatcatggtgatgatgaagttgaacatctgaagaccattgagcaggaacctgaaaatgaaataagtgaaattgagaatgtagagggatctgtagactcagtcattccaaagttgatggaaatgagagtgcagacacctccagtgatcaatgaaaaaagaggtaaaaagcgagtatcggccaaagagaaaccgagaaagcaaaaggaaaaagagcaaaaagtgccaacaggaaaaccagatgagctggttaaaagagtaagagtatggtttgagaaagaattcaaatcgtatgtggaagatggaaaaagtttccaaaggttggaatggmtaacagatgttctcactgcagcaattcagaaggcgtcagccggagatgagaaagcagtagaactgattgagaaaagatgtccacctttggaawkcgaggagggtgaaatgtgtacccagactgaaaagaaaaagaaaccaaaaagtggtaaagggaatggcggtcaagaaagtatgaagtccttgatggcctcatacagtgagaaccgagccaaaacctacaatagaataattggtaagcattcaaagcagtgtgagatcccaatagccaaagtacaaaagttctttgaagggaccactgccgagacaaatgtgccaaaggaaacacttaaggaaatgtgttcacgcctcccgaaagttgaagtgggaacgtggattgaaggtgaattcagtgaaagtgaagtgactgaagcattgaagaagacaaaggacacagcaccaggggtagatggattaaggtaccatcacctgaaatggtttgatcccgagttgaaaatgctgtcacagatctataatgagtgtagagaacacagaaaaattccaaagcattggaaagaggcagagacaattcttctctataagggaggagatgagtcmaaamcggataattggaggcctatcagtctgatgccaaccatctataaactgtattctagtctctggaacagaaggattagagcagtgaaaggggtgatgagcaagtgtcagagaggtttccaagaaagagaaggatgtaatgaaagtatcggaatattgagaacagccatagatgtggccaagggcaaaaagagaaacatagccgtagcatggttagatctcacgaatgcctttggatcagtaccacatgagctgataaaagaaactctggaatcttacggatttccagaaatagtagtagacgtcgtagaagacatgtatcgagatgcatcgatccgtgtgacgacgcgaacggagaaaagtgatcagattatgatcaagtcaggagtgaagcagggagatccaatctcgcctactctcttcaacatgtgtctcgagagtgtcatcagaaggcatctcgacagatcagtcggccatcggtgcctgaaaacaaaaataaaagtattagcctttgcagacgatatggcagtattagcagaaagtagtgaacagttgcaaaaggagttgacagctatggatgctgactgctcagcactgaatttgctattcaaaccggctaaatgtgcaagtctgatattggaaaaaggaatagtaaacaggttaaatgaggtagttttgagagggaaaccgatcagaaacctcatggaaaatgagacctacaagtacttaggtgttcagacaggtacggaaacaagggtttccataatggatcatataacggaagtgtcaagggagatagatctagtgaatatgagtcaactggcaatgcaccagaaactagatatactcaaagccttcatacttccaaagatgacctatatgtatcagaacacgacacctaaactgtcagaactgaaagtgtttgccaatttggtaatgaggtcagtgaaggaattccacaacattcccctaaaagggtcaccgttggagtatgtccaacttcccgtaggaaaaggaggattaggagtggcatgtccaaagaacacagccttattaacattcttggtaaccattatgaaaaagttatggtcatctgatagctatatcagaaagttgtatacagactacctagaggaggtggcaaaagtggaaattggaaagttcgaggtcaacttgaacgatctagcagaattcctaagtgacgaaagagcagtcgacagcaagttgttcggcttcaatgcgttcacgagggtgagagaagtggtgaggagtctctgtaagaataaagattctccactacatagtctgaaaataattgaaagagaagggaaacttgccataagtgtgcaagcaaccgaagaaagtattgagaaaatcttcactgaagaccaggaaaagaagttaatgtacctactgaaaggggagctaaatacagctctccagcacaggttctttactcaaaaggtattcaaaagtgaagtaatgagagtggttcaacagcatccacaaagtaacagttttgtcagaaatggtggaaaaatgagtttttcggctcaaagatttgtccacccaggaagactgaaccagttgccatgtaactacaacacttgggcaaaaggccgtacgaagttgtgtagaaggtgtgcaaagaatgaaaatgagacacagtcgcatatactgcaagtgtgtgactactcaataggaaatatcataaaggaaagacacgatgcagttctttataagtttagagaactcattaaaagagggtcaaaaggtcattggttagagagaactgaccggacagtaccaaatactggatcacagctgaagccagatctctatctggaaagcccagacgggaagcatgtgatactagccgatgtgacagttccatatgaaagaggcatcgaaggaatgcaaaaggcatggaatgagaaaatcaacaagtatactgatggatataaagaaatattcagaagacaaggaaaatccctagtagtgttaccattagtagttggttcactgggaacgtggtggaagcccacggaggaaagtctgatcaaactaggtgttgagaagactacagtaagaaggataatacctgagacgtgtggaatggtggctgaatacagtaagaactgctattggagacacatctacggtgaaaagtatgttcaaactccaatgataaatggaggaaaaaagcctgaaggaaatgattggaaaaagtgtgaaaaaggaatagaagttcctaaagttactaattagccgatcgtaaaagaaaccgagccgtaacaacaagcaaagtaaacaaaagaaaaatcaataaaaaggaaggttgacctcagaccccgaggagggaagagagacaccsagaaaaagagagacgcagagaaaaggagagacacctctcataaggagaggtaggtcaatccaaatgtaaacagaaaaaaccagtggggaggaaagaaagactgatttcacccactaaaatgaatttggaaacagaatttggaagagaaaagagaaagggaaacctaaagaaaatagttctcttgccaaaattctgtagaggaatactttgtcaaaacatgatagaaaccagtaatctggtacgaaagacaagtaagacctgaactgacaagaaggaagtcagaaagaaataccgctcacaaagcctgtgatcgattctcttacctactgaacttgttctcttggcctcgtaaccggctaaagggagaaggaatgttaattggagatagacataaagataggtggagtgaaggtcctgttcttgaaactaggaggaatgtggaaagagcagaaggccgcgaggctttagacgggtaactcagtcagttgctagtggtcttcggatccaacggcttcggacatagtgaggaaccctgggtacggagaagaaatggaaaagagatagggcgggcaaaggctaagttcatacactgtcatgcaaccactaaaccagtgggatctgcgggtgaatcactttcgaaaagaagtgaatggacgtgctgatgtctgactttaaagaagtctgaaattaaaaaaacagatataaaggcccctcactataaactccacagcaacaggtggtccggcgaggccggttcttgccaccattgcaccccaggctcgtc

SEQ ID NO: 1049 - DNA, 6092 bp, unidentified
  source 1..6092: mol_type = unassigned DNA; note = Description of Unknown: Trichomonas vaginalis sequence
gggtgagtagtctagtggtatgattcctgttttgggtacaggaggtcccgagaagcttccactgcaatcgtacgtgtactgtggcaacacagctataacagacagtttcacgccaaccgcgaaaacgattttgaagcctgaggaacaaaatttagatatcgttttgaaaaatattgcagcgttgaatccagaaaattactccgacttaatcaggagcctatcgaagatggagttcagattagattacccgaaagaaatagagaattactggatttcggaaaaattatttagccaatccatcgcatcattgcccatcagtttgttagtcgcatccatgttctcacctgaagaccgtgacttgagtacagaaccgttccactgtaacgctgatggctgtaatttccattgtgacaattgtgaaagaatggttgaacacatcagagagcaccataacactgaccccatgatcaatacatttgaaacaacagaagacacatttagaagaataacggccatcaaaatagacaagacaggcatcgaagaacttaaccctctaaaatacagatgctcgtattgcgacgagttattcaccgaagcagaagatcatgccatccatatgatttcacatctcacagaaaaattatcaccagatatatctttctttttcaacgacattttacgcctttacaaaactatcgacaaaccaacagtacaaaatttatttccagaaacacaagtcgcaatttttgacacacttgaagaaacaaacagattcagacttatcgtaggaagagaagccatagaaacaattgaagaagcattccctccaagtccaccaggaacagatcggaaaccatccataatcatcacagacacctgtcaactcaggtttgtaccatgcatggatgaaccaccaaaaggagatctcggaattctgactctacttttaagagatttcagcgcacacaatatcccgattaaatcactgaacaataaggaactaattgctgataaagacatcgattacagcccagattttgtcgaaggagctctagccaacgcagaagaacatgatacaacgaacagccagaacaacaatggaagatacattaactcagccgaaaaacttacagaatttttaatacaatgtgaagactacttaacgaacatcaaaacacttgaagacttagaacgtttctacacaacgattaaagactacagagtcaacaaagaggttatcgccgaagatacaccaatctttgtatatttcctagtagaagaagggaaattaccaaaaccaggtcttagatgcccacttgaatcatacgaaggacacgaagacaaggcattcgaatcactgagaaaactttgcgaccacttcaaaggagaaatcgcgaaaacgagctttgacccaaaggttcacaccatagacatctgggttgaatttttggcccaagcctatggcacaggcacgtttgtctacaaagatgaaaacggaaacatcgaccttgatacgcacgtattcaaatgcccttatgcagactgctcatacacgaacaacgacagatcaaaactcatggaccacatgaaaacgaagaaacacgccaagaacgtatacatcgagagatacggcttcttttggggtattgtcatagaaggagtcaaccgaccaaaaggaatcgtctacccgacactcaaagacatcaaagaacacgcttgtcgcaaatgtccagaagcaggatgcaacacatatgtaacagaattgagcgacatcaaagaacatctaaagaagaaacataagtctacaacagcaggagtagacggagaaatcgcgcacactgatgctacatactgctggattaccaaagaagaactcgacgcattacatgccgagagagcaagagaaagagcagagcaagtagacaacactccagtacaacagataattaatgctgacaacaatgaagagaacaacgagaaccaagaagacaacggaaacaacgaagaagcagatgccctcgacccgccaaataacacaacagagacagaagatgaagcggttcatgccgtcatcatcaatccaccagcaacagaagaggaagaggtagccatcatcgccgaggcaagaagaaacattccagaactccaacaagcagaagagagaggctgcgttacaccgaaaatgacatcactcgtccgattaaaactattgaaaggaggaggagaacttttcaacaagaaactcactccattagccacaagatacgcagctacaggaaatacagaagcagacaaaatcaaggtagattacttgacactaaaatgcaatgccgccttgagagaaatgatctacaccaataaccacagcgaatcaaagtttatgacagcagaaaatggagaagacacagcaccaccgccaaggatatcggaagacacaagagatcgcattcaaaaagcagccaatgaaataaaaggaactctcatcaaagtagtcaaacacataagtcacgcgagatgcctcaaagacagcacgagagacgatgaacacaataaattcgtcgaaatgattgcaaaaatcaaaaacgatctcagagataacaaattcgaacaatataacattgaagaaatatttcaaggaccgatctccgaccagagtattctcaacatcgtcaacacggaggacaacaacgaattcatcaagaaaatggattacattaaccgaattctcggaacaccacaggatgcatcaccatatgcaaggaagaagttacaagcatgtttcgccgataacccaacaaagactctcagaaacataatcttagccgacaaagttccacaacaatcattgaagccaagcgaataccttgattactacggacctcaatgggcaaacgaagctgaaggctacgaaaacttcctgcatcatgactacgcgttaccggagagatatggccaagttttcgcaaacgacttcctcgacttcatgacaaacgaatcgaagatcatcgaagtaatccgcaacaagaatcatttatcggcacacggcctcgatggaattccgaactcagtttacatgctattcccagtcagcgccgcaaaattcctcagtatattattcagatcaatcatcatatcaggtcacatcccagactgctggaagctctccaagacagtgatgctttttaagaaggacgacccatcgttagcaaagaactggagaccaatcggcatcacgtcatgcacttacagaatcttcatgactttagtcaacaaagcgttacagatgatcccaatgttccacgcaatgcaaaaaggtttcgttcgcggagcaacactgagtgagcacattgcagtcgcgaacgaagtcctttgccaatcaaccagaacacagtctgaaatgttccaaacagcaatcgatttcacgaacgctttcggcacagttcctcatcaattgatctttgattctctcgaagcgaagaaagttcccgattcgatcatcaatctgctcaaggacctctacaaaggagcaagaacggctatctatacaagacatgcacactccgagatagttccggttcgcagaggtgtcatccaaggctgtccactcagtccaatcctcttcaactgctgcttagatcctttattatatgcagtccagaggagacactttgaggacggttacagattccaagacaaagcaggacagtattcaattgccattcaagcttacgctgacgacgttctagtcatctctccaacacatgaaggaatgcaaagaatcttaaacacagtagatgaattccagaaaattgcgaaactcaaagttgcaccacagaaatgcgtcacacttgccaaaacatccactgcaatccaacctttccgcattggtccagacgaaatcccaatcaagacgagcatggacaacatcacatatcttggaataccaatctctggaacaaagacatcaagatttgcagctgcaactggcattctggaaaaggtcaaagcacagatcagagtcgtcttcgcgtcacatctcgctctctctcagaagattatcgctctcagagtcttcatcttgccacaacttgacttttacatgttccacaacgtattcagagtcaatgacttgaaagcgacagatcagatgatccgaggcctgatcgacaaagaagcgccgacgtcaaacattccggtttcatttttctacatgccgaagaacaaaggcggctttggactcgttaaattggaacttcgccagcctcagctcgttctcactaaatttgcgaggttatggttaagtcaacaagcagaaaccaaagccttctttcacacaatggctcaagaagagaagtcattccgcaaggtcgtcgaagaccaagaaaatggtttcttaggcatcaagatggaaaacggcaaaattgtccagaagaacgaaagatccaaacgcacaaattgtttcatcacacaggcggctaaagcagcagacaaactggaagtcagattcaaagaatgggacaaaggaggcatacaagtcagaggtgtaggagaaaatgcaacagactggtaccgctcgaaacacatcggccaaatctcacccttaatcggtcgcgtcatccaacagaggcagtacgaggagttcaagaaagacgaaacacactcacacactttctgcgaaccagcagcgctagcggagtcacacgacatcatgaagagaccacaagctgttccaaacaacctctactcagcggctattgctctccgtacaaacacagctccaaccccagcaaacatgcacttccacaacccagaagttttggctaattgtccattgtgcggatgccaatcctgcactctcttccacacattgaacatgtgcagaaaccgtttcagtctatacaaatggcgccacaatatcatatgcgatgacatttaccaattcattcacgatcactatccaggagtaaccatcaaatgctcggcgagaattacaagtgacggctaccaaacaacaggcccagagctcgacgacacagttaaagatctcctcccagaccttgttgtctacgatgaagcgaacaagatgatcaagatcattgaagtcacatgcccttacggcacggacaacaatgttggcaactctcttgacgcggcatacgacaaaaaggttaacaagtataagagccttgctgaacaaacagagagattatttaactggaccacgacgctctcaattatcgtagtctcatcactaggagtcatccctctccgtacaaaactcgacgcattgagaatctcacctgcagatcacatacagctactcaagagactttcgatgcacgcgatagctgcgagtgcttgcattgtttttgaaaaagtgccagaattcttcggtatgcgctgccgtcccctcccaggacgagtcacagctcccaatgcagcgatcccaccaaacaacaatgaaaacaataacgacacagatcatggtcaggagaaccaacaggcaacctctgaagagcaaccaaccaacaatggaaatgctcaagaagacaatggccaaggcgaacaaataaataattcaaccgaacaaactatctctgttgatcaaatcatcgaagaagatgctgagaacaacgcgatagaacaagccttagaccaacccgatgaggacgaattccttaactaagaagagataagacgagtgagaagaacagaagcatagtaggattggcagagcttaagcgatgtcactcggtacgaaacgtgtaccaaacaccggattccgtgctaggaatcacaagccaaaataaaagagacaccacgaaaattactcaccctccctcaaacagataataatattaacctcccatccatcagtccgtatggtctgataacagactagcaccacatccatgatacactcattggagtgaaaaccaccaacaacaaatccacctagaccaaatcctgccccacctccacccaagtagctcgcttcgctcgctcacctaaaactttgctcgctcgcttcgctcgctcgtcttaaccctttccgaataaacacttacaattcccggctcgccccatttttt

SEQ ID NO: 1050 - DNA, 7059 bp, Caenorhabditis brenneri
  source 1..7059: mol_type = unassigned DNA
gactcgccttggggaaggtwtttcaggggksaattgccgmaggcaaggcagcccccsmmtagcttacaaagtaagtacmcattttcatttcttgtgaattctttaaacatatttttcttgttttttgatttcttttttctctaccttcccccaattcttcccctcatcttgtgtatacatccccctcctccaaccaatcaatacattgacctctctcttctgtcaaaaaatcaatactagtatattgtcccttgtatagtattatttgacgtcgtctttgtattaggagtaggtaacaawctgtgtatggcttcaaaaagcatgcacaaacwcctgtcaaaaagtawttcccatcmtgtgaatagctcaacgacwkgaagmccaatgatatgagatatcatmgctccaacmacccagcascccgcacctcagacaatcamtggagatcaatccmaaaggacgtccgtcgcccagatccgtcaactatcgaggagaaaagcaggtataacaggtccataggtattccagattcgctcaaagawcggagcagtgcagtccgcagcakgagcagccmacctccgtcaggtccacaggacgtccgtctcwccaattcgccatctctcgatgataggagaaggttagtwgattgtgaaacaacactagggtcataccgcgaatggacsgataaaccaatgatgggaaagatgacgtatgcggcagtgacaaaaagagcgcccccaagaccgcaaacgggaggagcccggttgagcaccaatctcctagcagatgaaatggagataaagtatcgagacaccaatgacatccgccttgtcatagaccttcccaatccccacctcatcaagtgtccgctctgtaaaagctgcataagtgcgcggggaagaggtgctaatgcgctgaagtacatgaaaaggcacatagccgacgcccaccacctcaacgccgacttcgtctacaaatgtagcaggtgtcaagagcatgaaccagaaaatgtatgcggcgcgaagtggattgtgaatcatctcaaaagagtacatggctatactctagaagatgccgtatccacagcaaaaccctctacaaggcagcagattgcaaacgccttcaacgactctgctccattcatagacgcccggaaaacatccgatgtgccagagaagaagagcagagaggcaggacttgagaagttcctggcccctacaaagtccgaggacacaagggaaaaaaccccgccctccaccagaaagtcctctgaaagttcagaggcatcaatccaatcgaccatccaagagactctttcggagtcgtcagacacattgaccgtccaagaaataatcaatatcagcagtgaagatgaaatggacgaggagccaccgaaacggcgtgtcaatgtctgggccttgatccatgagaatggcaaggacgcctggatagactcagacttgatggtcatattcctggaatcaagagcaagaggatatgaatcatgcagcatcatagaccctctgaacttcatttgcactgacatgtcctatctgaccacaatagtcagaaggcgcatggaagaaggctacaagaaaatcatatttccattatgtgcaaatgaccactggacactggtcacgataacaggtagcacggccaccttttacgatccaatgggaaatgagccaactgagactgtcaagaagatgatcgatgagctcgaccttgaaatgcaattagccccgtcaaactctcctagacagagagactcgtggaactgcggcgttttcgtcatgaaaatggcggaagcgtacatcaaggatacgcaatgggatctcacggacgtagacacggacgtcaaaacgttcagaaggagcctcctaacagagctcaaagcaaagttcaacatctttgccgaggatatccagacctaccggccaccctcaaggaaagccttaacgaggaacagccaatcgcctgtcgttgtttgtcacaagtgctctcggccagccacaccgatccaggatgtgagcagaatggaagtggaagaagcgccagtgctggtaccgactcctgaagagcctccacaggaatggaccttcgtcggaaaaaacagaaagcgtggtgtgacaagccgaaccccgaacacgtcgccggaagccaagcgaccggctttcccaccagtacccctcaaaccatcagccaacagatggcactttccagaagaggaaactgaaaagatggaggtctcaagtgccgacgaggtgaagaactctacccctccaaaaccacccaagatacctaatcttctcgcgatgaaaatcgccagtcccgtacctctgaagagaggaaacccgtcaaagaagcacggtaaaggacacatgatgaatacagcgagaaagggtccgacaaagaaagagatgcccaaaggggaaccagcgaaccttatagttaaaatcagaagctggtttgatgagcaactgaagatgtacaaggatgaagggtccaatctacaaagactcacatggttatcggactctctgaccgccgccatcggaaaagcattcaatggcaacaaatacatagtggaccaaatcatcaagagaaacccaccaccacttgttgaaaagggcgcaatgtcaacacagacaagccgaaagagagacgagttcaagccaagggagagaatggcccaagagcccaatgagccgcttcgtattcaatatgccaagaataggcaaaaaacgttcttcaagatcattgggaaacagtctgaacagtgcaccatcaacattgagactgtcgaacagcacttccgaaaaacactcaaggctcctgtagtctcagagaatgcaattaaaacggtctgcggaagcatcaagaaagtattgatgccaaagaccatagaagacccaatctcctccgtagaagtcaaatccatcttgacgaaagtgaaagacacgtcaccaggaacagatggtgtcaagtatagcaatctacgctggttcgacccagaaggggaacgcctcgccaaactgttcgaagaatgtcgcaagcatagagaaatacccagccattggaaggaggcggagacgatcttattgccaaaggactgttcagatgaagagaagaaaaagccggaaaattggcgtcccatcgccctcatggcaacaatctataagttgtattcagcagtgtggagcagaagaatctccggtgttcaaggggtaattagcccgtgccaaagaggctttcagtccctcgacggatgcaatgagtcgatcggaatattgcgcatgtgtattgacaccgcttccgtactcaataggaatctctcttgctcatggcttgatctcaccaacgccttcgggagcgttcctcacgagctgataaggagatccctagaatcattcggatatccacaatcagttatccaaatcgtgactgacatgtacaagggagcaacgatgaaagtcaaaacggcagatcaaaagacgcaaagcatcaaaatagaagcgggggtgaaacaaggagaccccatttctccaaccctattcaatatttgccttgaaggcatcatcaggatgcatcagatgagagagaaagggtacgattgtgtcgggcataaagttcgctgcctagcgttcgccgacgaccttgcgattctaacgaacaacaaagatgaaatgcaggaagttatcgacaagttggatgcagactgtagaagcgtgtcgttgatctttaaacctaggaagtgtgcatctttgactatcgtgagaggtgcagttgataagtatgcaaagatcagaataaatggagacgcgatcagaacaatggcggatagagacacctatagatatctgggtgtaaagaccggagttggtggaagagcatcggaaacggaagctttaattcaggtggtcaaggagctccaaaaggtccacgaaaccgacctggctccacatcaaaaacttgacatcctgaagacgttcttactgccaagactgcagcatctctacagaaatgccactcctaaactgtcagagttgagagagttcgagaacgttgttatgaaatcagtgaaacggtatcataacataccaataaagggctcgcctgtggaatatgtccaaatccctgtcaagaagggtggactaggagttctatctcctcgactcacatgcctgatcactttccttacctcgaccctctgcaagctatggtccgatgatccattcatatcttctatccacaaagacgcactaagcagaatcacagtgaaagcgatgggactcaccactcaaagtgccacaataaaagagacatgtgagtacttaaacacaaggaaagctgtcacgaaaggaggatatagtctattctgccgcatgaatgaatctctccgcacgctgtctgtcatccaaggtgctccactgaaatcaatggaattcatcccggtgaacaatgaaatcggtatagcggtacaagccacgaaggattccgagatcaaagtcttcacaaaggctgacagcctgaagctaatgagtaagctaaaagatctggtcagatctgctatgctcaaacggttcctcgaagagaagagtgttaaaagcagagtcacccaagtactccaacaccacccacaatccaatagattcgtcagggacggccgaaactgcagcatagcagcwcagagattcgtgcaccckgcccgtctgaacctcctctcctgcaacgccaacacatacgatgttaaccatccaaaaggctgcagaaggtgccaggctgacttcgagtctcagcagcacatcctgcagaactgtcactacagtttggcagggggaataacccagagacatgacagagtcatgaacaggattctgcaggaaattggaaacgggagaaaagctcactacaagataatggtggatatggaaaccggcgccacaagagaaagaccggatatcatcatggaggaaagggacggtccagaagtgttactagccgacgtgacagtgccctacgagaatggggttcaagcggttgagagggcgtgggataagaagatagaaaaatacaagcacttcctagattactaccgcaaaatcggaaagaaggctacgattcttcccctagtagtcggtagcctaggaacctactggcccgacacaagccactcactgaagatgcttggcctttccgacggtcaaataaggaatgttatacctgaaatctgccaaattgcactggaatcctccaaaaatatctattggaagcacattctcggtgatagctacaaaacggtggagggactattttgtcagaggaataacaaagaagtccgattcgaaggaaaaggtgaaaaacaccacgtgtcacaaagattccaacctctgaaatgtgaaaaggtgcgtacaatgaaaagcacaaaagaagagggtagaagtagatcgaatgccaagaaaggtccgaactggcgaagatcaaaaagcgaatcggacggaaggagtgtgagtaaaggcagatactggcgagatccgtcgaacaagccgccacactcgaagatgacccagtcggctttagctaagcgctaaaccggctcctctgggaggaggtatgtcagaggacattctccgtgggcggatgggaggagtagggtaacgacccgtcattctggatgcctaaaccaccacaatctgtcaaggcaaagtgccccaaaagcacacgcgtggatcggtttggatgccgactgagccagagggcaaagtcgaaggccggtaggctcccggcgggttgtccgtcatagtcagtggtgcgcctacacccaactgctatgacacacaaggacaacccaaaataaataagccaaggcggcgttagcttcgagctaacaagctccccgagaggatggttgccacagggcaccatcctggggaacgacccgatctttcggatgcccaaccaccgccaatctgtcaggcaacgtgccccaaaagcacacgtgcggagcggttggatgccgactgagccagagggcaaagtcgtaggccggtaggctcccggcgggttctccgtcgtagtcagtggtgtgcctacacctaactgctatgacaagcgtataggaggcccggaaaaacaagccaaggcggcgttagctgagagctaacaagcttctcgtggatgggtgccagagggcaccatcctggtgggtggatggggggagcttgggaacgtcccgatccttcggatgcccagaccaccgcaatctgtcaaggcaccgtgctccaaaagcacacgcgcgggttggtttggatgccgactgagccagagggcaaagtcgtaggccggtaggctcccggcgggctctccgtcatagtcagtggtgtgccttcacccaactgctatgacatgcgtacaggaggcccggaaaaataagccaaggcggcgttagcatagggctaacaagcttctcgtggatgggtgccagagggcaccatcctggtgggtggatggggggagcttgggaacgtcccgatcgttcggatgcccaaccaccgcaatctgccaggcaacgtgcttcggawggtcattggttctagacttgtaatagaccattggccggaagagcacacgcgcggttggttggatgccgaccgagcctagagggtgcaaacctgaagggcgaggtcgaaggccgtgaggctcccggcgggaaactccgtcatagttagtggtgtgcctacacccgacgactatgacacataggaggaatcctgatctgatatgatcatgtatatagggagggcgaaggtaaatagtcagkgtcaaagtccacgtggcagctactccccagcatagtagtgatgcgagtggawccaactttgacactgatgttccctgagcctgacccatctgcacaaatccaacagtgtatgatggcccacacactgaggacgagtatcacttgtgatactcagaggtgtcccccatgatcaaccaatatcacagctagcggacctaccgtgaggtagacccccgccgctgtagcaggctcgcctc

SEQ ID NO: 1051 - DNA, 6643 bp, Caenorhabditis remanei
  source 1..6643: mol_type = unassigned DNA
ccaactctcatcgtattaacctacggtattcactcctagtgagtgtaataaaggttaattacgttttctcttgcmagagaaaaagaaaattcgaatcctttttgtgtaactcacaaactgacagagacctatcgaatttcctttgtttcgtatataggaatagtcactctggaccacgaagtggacagttgtcggcggacttccagagtggagagaaaaggtgtgaagagaggaggtctagaaacacttcggctgtctaggaccagttcctgagtggaaagaggaaggtctagaaacacttcggctgtctaggaccagttcgtgagatctctcgtggagagttgaaaacagtcagctgaggctactgtatttcttgatagccccgcccccaatccccctcccccccccctcgacagatttttctgtttgacctcctggaatttgcgaggagtgcgcgagaattttcgaattcttcgcgcgttttctcgaaattttccagaagattcgagcggagaatcttcgagaaagtgagctgaatttcgcgcgaattttccgcgattttcaaattatcgatttttgtcggaaaatttattttctggcaaaatttgattgagttcacgcgggagagaaggaattgttggaaaagggtattgatttttgtggcggaggaaactcccactgaatcaataactctcaaaggagaactcatcgaacaacctcgggtgacctgaatcttgggcgaaattttcgcattgacacaagataamacaaattactgtkgaaaataaatcagaacaaactgtcaaaaagagagacaaaaagtattgattaacaacatcatgacaaatgtatatcttaagcctgtgaatgataaccagactaacaaaaccggtgataattctagaaatactatgtcaaatagtcaatgtgaaatgacgtggaaacctgtagccagaacatatgctcaggcagccagtactaacccggccgacgacaaaacggtgactgtccttgggtgcaaatacaatctgctaaaactgggaaatactcctcagacgtcgaaaaggtcgcctccaaaaccatcgagaggaggagctcgaatcagcagtgtgtatactctgactgatgagctggagattacgcacagagaagaaggtaagatcacattcgcgatagaccttccaaacaagaataacatcttgtgcccgctgtgtcgggagtgcacccaaacccgtgggagagggtccagttttaccaagcatatgaaactccacgtgaaagagaagcaccaacttgatgccacgttcatctacaagtgtagtatgtgcaacgagtacgaaccggaaaaaaaatgcggtacgaagtggatccagacccaccttcaaaaagtgcacaactacaagtatgacgagtctgcaatagttgtcccagtaccacccaacacaagacagcaaatagctaatgagttgaacaatgctgccccattcgttgacatcagaaaaccgaaagctgctgctgttgaggagaagaagactgaaaatggtgctctgttaaaattcctgaccaagtccaataaggacgatcaggtaaaatccccatcggawgatattccagatgcggaaagccctgaaaaagaaactcaggcgctcactatcgatccgaaagggaacaactcaccatcaaaaagctcaataagatcgagccagtcctcagcttcctccgtttgtcaagaaatccaggaaatcatcacgttgagtgaggatgaagacccaaaaggggctcgtccaaaaccaggaatcaacgtgtggagcttgataaatgaaacgggaaaggatgcatacattgatacagatatcatgatggcgttcttgaagatgagagtggaaaactgtgactccgtgaacataattgatccactcaattaccagtttcccgcgagagtggacctagtcccacttatccagaggaatctggaagacggaaagaaaagagtcgtgtttccgatctgtgcagacgaacactggacgctcttgaccatctcgaatggaattgctgcattctatgatccgactggatcgcgaatgagtagttatattgaagagttggtgaacgaacttggactgattatcccaaaggaacaggatgaacagccaagacaaagagacagctacaactgtggggtatttgtgatgaaaatggcggaagccttcatccaagataccgaatgggaaatggaggaagtagaggaagacgtgaaaaacttccgaagaaatctccttgaagaactgaaacccaactacgagatatttgctgaaaaaatcaaatattataactctccgggaaaaagtttcgcccaaagtcgacccacaagtcgaagcagccagtgtgccgtctgtccgacgtgctctcgttcagctacaccgatgatggatgtaggaaacatggaagtggatcccgttccacagcaacaagagacaccgaagagtcgcgagccagaacaagatgaaggctggaaagtggtgggaaaggctagaaagaggggagtggtaactgaacgatcgccaaacatctctccagaagccaagagacaattcactggtccagagatcaaagtcgtctcacctgggaagtttcacccacttgtgggcgaaactgaggagatggaggtgacgtgtgacagcccaccaacgaaagagcccactacggaaccgaaagtgactccaagcctgccagcaatgaaaattgctagcccagaagtgacgaaaaagcaaacgtcaaagaagaagggaaagtatggcaaaaagaaacagsagacaaagaaagctcagccgccgaaaggggagccaacaaagaaagctcagccaaaaggagaaccggcaaagctcattgagcaagtgagaacttggtttgataaacagatgaaatcgtaccaagagcaaggttctaacatccagacactgacctggattgccgactcactcactgccgccatcttcaaggcaaacagtggaaacaagtatctggtagataagataactgcaagatgcccaccaccattgctgaatgaaggtgagatggcgacgcagacgagcagaaggacagaagcggtgaaaccaaaagatcgatttgtaaaagaatctaacgagccgctcagaatccagtatgcaaagaaccgagcaaagaccttcaatgtgataattgggaaacactccgcacgatgtgaaattgatattaacgtcgtggaaaaccacttcaggcaaaccctgaaagcacaaccagtaacagaagaagcattgaatactgtgtgcagtggaatcaaaaaggcgaaagttgatccaagcattgaaggtccgatctcgtcaggagaagtgaaagcgattcttgcaaagatcaaagatacctctcccggaactgatggagtgaagtacagtgatctgaaatggttcgatccggaaggtgaacgtttggcgttgttgttcgatgaatgtcgacagcacgggaagattccgagccactggaaagaagcagaaactgttctgctaccaaaagattgcactgaagaggaaagaaagaagccagagaattggagacccatctctctaatggctactgtatacaaactctactcctcagtctggaacaggagaatctcctcagtkaaaggagtcatcagtgattgccaaagaggcttccaggcgatcgatggatgcaatgagtcaatcggaattctgcggatgtgcatagacacagccacagttctcaaccgaaacctgtcgtgttcatggttagacttgacgaacgcttttggaagcgtgccccacgagttgatcagaagatcactagccgcattcgggtatcctgaatcagtcatcaatataatcagtgacatgtataatggatcgtcaatgagagtcaagacagcggagcagaaaactcagaacatcatgattgaagctggagttaagcaaggtgatcccatctcgccaactctattcaacatctgtcttgaaggcataatccgaaggcatcagacgaggaagacaggttacaactgcgttggaaacgacgtacgttgcctggcatttgctgacgatcttgctatccttaccaacaaccaggatgagatgcaagatgtgctcaatcagctggacaaggactgtcgtagtgttgccctgatatttaagccaaagaagtgtgcttcactgacgatcaaaaaaggaagtgttgatcagtatgcaagaatcaagattcatggaatgcccattcggactatgtcggatggggatacctacaagtatctcggagtccaaaccggaaacggtggtagagcctcggaatcagaatccctgactcagattgccgcggaactccaaatggtccatgacacagacctggcgccgaaccagaaacttgatgtgctgaaggcattcatcctgccgagactgcaacatatgtacagaaacgccactccaaagctgacggagttaaaggagtttgagaacacagtcatgaaaagtgtgaagatgtatcacaacatcccgattaaaggatcaccactcgaatatgtccaaattccagtaaagaatggaggactcggagttatgtctccccgattcacgtgtctcataacgttcctggcgtccacactgttcaaactgtggtcagacgacgaatacatctcgtccatccacaaaaaggcgttgagtagaatcacggcaaaggtgatgggactgaagacccaaaaagccacgctccaagagcagtgcgagtacctgaacaccaagaaagcaatcacgaaaggaggttacagcctcttctcgcgaatgaacgaagctattcgaacgctcagtgtcaaccttggagcaccgctcaaatcaatgcaattcattccggaaaatggcgaaattgctttagaagtgcaagcatcagaaaactcacagatcaaagtattctcgaaagctgacagtatgaaactggtgacaaagctgaaagatctggtgaaatcggcgatgctcaagaacttcttggaaaacaagaaggtcaaaagcaaggttgtgcaggtgcttcaacaccacccacaatcaaacaaattcgtcaatgatggaaagaacwkcagcatwtcctcccaaaagttcgtacacccagcacggctgagccagctggtctgcaacgggaacagctacagtaaagaccttccgaaaaactgcagatggtgcggctacgaatgcgagtctcaggctcacatcctccagcattgcacatacagcctttcatctggaatcacccagaggcatgaccgtgtcctgaacaggatcttgcasgaggtgataaaaggcagaaaaaacaacgactactatgacataatggtggatacggagcccggaccaaccagagagcgtccagatatcatcatgatacagaaagatggtccggaagtcctactggcggatgttacggtaccatacgagaatggagttgttgcgatcgaagccgcgtgggattggaagatggagaagtacagtcactttattgattacttcgcaagactgggaaagagagcagtaatccttccactagtggttggaagtcttgggacctactggccagacacctcaaactctctgagaatgctgggtctctctgatgggcaaatcagaaacctgatcccagacatctccatgattgctctagagtcttccaaacaaatctactggaggcatatcttcggagatagctacagaattgtgagtgatctatactgcagaaaagaccagcaggagatcagattcggagatgaacccatggaaaatgttcaagtctcagatcgattccagccttttaaaacaagagagcgtgagaagaaatccgaggaagagaaaaagagaagatcaaagtccaaaaaaggcaaaacttggcgaggatccaaaaaacaaactgattcccggcaatccggcaaaagcaatcagaatcagggcttccaaagaagcgttggacaaggcgtatcacggtgaataccgtcagataagcccccaacataaaaataaaagtcggcgttagctaaccactaaaccggctcctcattgggggagagtatcattccggtgctctccgtttgggcggtagggaggagttgggtagcgacccggaagtatggatgcccaaccaccgcaatctgatctggcattgtgtttcggatggtctctgtctctagatctgaaatagagctctggcctgaagaacacacgcgcggaccggttggatgccgactcgatctggagggtgcaaacctgaaagggaaagttgaaggccgtgaggctcctggcgggaaactccgtcatagtcagtggtgtgccaacacccgacgactatgacatagttggaggaatcctgatctgataataatcattgttcatataagggagggggatggtaaatacccagggtccgaaaccatcaaagcagctactgaccagcatagtagtgatgaacacatagaccctggggttccctgaactcgacccatctgcacaaacccactttgtacaaatgaaccaaactgatgaagagtttaatgatttcttacatcacagctagcggacctaccgtgaggtagactcccgccgctgtagcaggctcgccattg

SEQ ID NO: 1052 - DNA, 7796 bp, Caenorhabditis remanei
  source 1..7796: mol_type = unassigned DNA
cccttttctatcgtattaactacgataaccgctcatttgagtgtaaaaaaggttcccccctcctcgcctgccttacccacgcatctctgcctctgggaaggcggagggtcaacttgcgggtctgtggatttcctttcctatccaccgcccatattctctgtcgaaagcctacctagatcagccgggagtttttcctatcccattcaggcgatcgctcaaggctgttttatcgacactccttcttgacaagtatttatttcttgacaaattctatttttccttttatcgattttctcttatttatcgattcttgtgaaaatatgaccaagaccgaatggtcctggcgtcatcgatctcgctcccgctctgttggaatcgttgtgaaaatcgatacaagcgactatgctaacgtccgagtgcatgtcgcggcggacctttccaatgaggatggccacacgagccacaacaacggcatcattctccccatcccaatgaagcccagcgtcgatcgattctgtcaaattcaataccctccaagagggtactatgttccgcatcctcaaagtcagaaaggccatgatgcaaagccctcgcgtcattggaatgaagaggcacaacctccctactaccacaacaacaatcatgggagaagggggcgttcggcaaaaccaagtggacgccgacccccacgaaagcccatacttcaggaagagtccctggcagcgcacccccaaatacccggggatactgcgtcagcggtcccactgtactccgacgtcgtcaacaatgaaaacaagagtcaggggaaaccaccgcaagggtcccacagaagaagtggaagaccaggaacaaagccctctgttccggttggtgaggcagagcaagaaacgaattcccgtccaattgctccagaacccatcgtgaaattcaaacacgataaacacgggtggactactgtccaagggtcccacagtagtggaaggccggtaccaaagccctcggtaccggtggtttcagaggcaaatcggttccagttactccaggaaggggattttccaccccttacaacatccgaatcttcgcaagaagagattaaagtaccgaactaccaacgaatagtgtcaccgattcctctcccctctgaagaggatagtaagttgccgactaaatcaaattacagagcgcccaagggacgaaagagtcgcaactacaagaagccacaacaacaaaatccgaagaaatatcagcagaggttaccctatcaacccaaggtcaacaatgctccgacggatcgcatggccccagaacaactcaaaggaggaggaggaaaaaccgcccacaatgacattgaagagatggaaattgaggaagacactgacgagaagattatccaagtgaaacgaatcaaaatcgtcaataagctaactccgcatcactttgtttgcatgatgacgtatccaaccgacaacatctatagatgcttcgtcaaaggttgcacagcaacatcacaaggtggttggggagcagaggaccttaagtacctgactgtccatatcagacaagaacacaaaattaaggtcgaatggacgtacgaatgcgggatatgcggtgacctatcgggaggtgctggcaaacatatcagtaaatggatcaaaccccatatgaggaagaaacacaatagagatgccccaaccaatttcaagatgggttcaagaagttcaggtaaacccaagattactgaactactggaggagagcgccccgtcttgctcgaatccaagaaggaaaaccctcaaccagaagaagactgctataatcacgcaagtcactccggagaaattgaaaacgggctatcaaacgagaagtgtcacgaaggctctcagcgtcctgaaagagtcacgacaaaaagagctggaagtgttgagagaagaagaaaaggctaacgctaaacaaaagtctaaacttcatcctttcttcaccaaagcccctcatatagatggtgtgaaaccaacagtacggagagaactatcaaaaatgattactcccggaggagaacataagggaacaaagataccaatggtccacaccaagcgcggtctcatccaaaagataaacagaaaagctaaaaaggctaaaccaatgcatcttgacgaaagtaccatcatagaagcgtcacagctcgacgtcatcactattgacgacgacgacgaagacgacaacatgacaccaatgcgaagaagattcaacacttggtgtcttgaccacgagacgactcaagaagcatggttaactgacgacgtaatcaattggtacttgaaagacctatgctttggtaacgaacaatacatgctcgtagacccactagtatggctgatatacaagatgggaggaatggcaggcgtcgaacaaaggttcaaaagcaagaagacgtgcctattcccaatctgcgaagctgaccactggattcttcttgtattcgatgagaccaacttgtgctacgcgaatagtcttggatcccaaccaaacggacaagttaagaacttcattcaacaactcaaccgaaagctctgcagctttgagaaagaagttccacttcagaaagatagtgtaaactgcggagtacatgtctgcctgatagcaaagtcaatagtcaatggacaattttggtacgatgattcagacgttcgaacgtttagaaccaacgccaaggcggctctgaaagcccagggctacgagctcttctcggaagcaccaaaacaaatcgaaaacccagactccagccacagagaagacatcaaggagaacagtatggaaatgtgttcggaatctttgatgatcgttgcgactccacagaggagtgaagcacctatggaactagtcgacactgagcctagtgatctggaatcgccaaagtcagacagagtagtctacgaagactgcatcacagctctatctgatgtttcggagccaagaatgactccagaaaagagcgaaactccagaggtgccagtggtggaagaaagagatctggattggccaaaactggaatcgccaaagtcagacagagtagtctatgaagactgcatcacagatctgtctgatgtttcggagcaaagaatgactccagaaaagtgcgaaaccccagaagcgccattggttgtagaatgtgttgagttggaaaggctacctaaggatctgccagtcacagacaggtcaactgtcgtggcaatccctgaagcagtaaaactggaggaaaagtcagaagtggtaattccacggctcatggagttatcatacaccgtccctccagaaccctctccagtggttgaatacacccaaccatacactcacactcacactaaaccaaaggtcaaagctacatgccagatgggaaagaaaaggaaggtaccaactgggaaaccagacgaactgattcagattgtgagacaatggtttgagaaagaattcaacgattatgttacggaaggacgaaactttcaacgactggaatggcttacgaacttactcaccgccgcaatacagaaggcatcagctggtgatgaggaaacaatcgaaaagattcgaaagagatgcccacctccagaagttagagaaaacgaaatgtccactcagacatctcaacgtcaaaagcctaccacaacgaatcagaagaaacgctctagaaacactactcaatcggatacacaagccaacacatactggcgaaatcgagccaagacatataatcaaatcataggtcaagatttcaaacagtgtgacataccgatcgcgatactagaagaattctataaaaagactacctcagtgaccaatgtccctcaggaaacccttgtgaaagtcacctcaagactaccaaggttagacattggaaagtggatcgaggatccgttcacggaacaagaggtatttggtgccctcaaaaagacaaaagacactgcgccaggaacagatgggctcagatactatcacctccaatggtttgatcccgactgtaaaatgttgagtagcatttacaatgaatgccagcaccatctgaaaattcctgcccaatggaaagaagctgaaacaattctcctcttcaaaagtggcgacgaatccaaaccagacaactggcggcctataagtctcatgcccaccatctacaagctatactcaagtctctggaataggagaatacggacggtgaaggggattatgagcaagtgccaacgaggattccaagagagagaaggttgcaatgagagtatcggaatactgcggagtgctattgatgtggctaaagggaaaagatcccacctgtccgttgcatggctggacctcaccaatgccttcggttcagtacctcacgagctgattgaaagcacgttaagtgcatacggctttccggagatggttgtacacattgtcaaggacatgtataaagacgcttccataagagtcaagaatagaacggagaaaagtgagcagattatgataaaatctggggtaaaacaaggcgaccctatctcaccaacactattcaacatgtgcctcgaaacggtgattagacgacatctgaaagaatcatcaggtcacaaatgcattgacaccagaatcaagcttcttgcatttgcagatgatatggccgttctagcagaatcaaaagagcagctacaaaaggagcttacagaaatggatgaagactgtacacctctcaacctaattttcaagccggcgaagtgtgcaagtctcatcatagagttcgggaaagtgaggacccatgagcagatcatgttgaagcgagagccgatccgaaacctcaatgatgacggaacatacaagtatctgggagtgcatacgggagcagatgcaaggacatcagaagaggagctgatcatttctgtaacaaaagaggtagaccttgtcaatcgctcggcgcttacgccaccccagaaactggactgtcttaagacgttcacactcccaaagatgacctacatgtatgccaacgccataccaaaacttaccgaactttcagcgttcgctaacatggtcatgcgaggagtcaagataatccactatatcccagttagaggatctcctcttgaatatattcaaattccgaccggcaaaggaggacttggagttccatgccctagaatcacggcattgattaccttccttgtctcaaccatgaagaaactgtggtctgatgatgaatacattcgtaagctctacaactcttatctgaagaaggttgtggaggcggaaacgggaatagtggaggtctccacaaaggatctagcagagtacctcagcaacaaggtaccatccagaaagcacgaattcgggtataactgctactcgaggattcgcgaagtttgtaatgggctagctctcaaccaagctgcccctctctacaaacttgaattcatcgaacaagacaatgagttagcagttgttgtccagccgactgaggagagcaaggaaaggattttcactaaagatcatgtgaaaaagctccagtcgctactgaaagccagcgtgaatgacgcactgctacacagattcttgacaacaaaacccgtcaaaagtgaagtggtacaagttctccagcagcaccctcaaagcaacagcttcgtccgaatgggaggtaaagtaagtatatcggtacatgtatggatccacaggtcacggttaaaccaactaacgtgcaattataacatctttgatccaaagcaaccgaaaaactgccggaggtgtggttataagaacgagactcaatggcacatcctgcaagactgcacatatggctgggctaaacttatacgagaaagacacgatgccgtacatcacaaggtagtcacaatgatttgcgctggggcaaagaagaactggggccggaaaatcgaccaagaactgcccggtttcacttcactccgtccagacatttgtctgacgagtccggatggcaaagaggttatctttgcggatgtttgtgtcccttactcaaggacaaggaacatcgaattcgcgtggaaagagaaaatccgaaagtatacagaaggatacagtcatcttgttgcacaaggaatcaaagtgacagtccttccgatagccataggatcactcggaacttggtggacgccaaccaacgaaagtctctatcaactgggtatcagcaagagcgatattcgcagtgccattccattactatgctctactgtgatggagtatagtaagaacgcctactggaatcacatatacggaaactcatatacctcggtcccactgagatacggacaccagaagcccgatggagacgattggaagaaagaactgagttgcgaaccagttctagctctccaacaataacatgccttggaaggcaccacgccaaaagtcctggcaactgatttgaataatgtataaaagtaactggaaccaaatgcccgataggtagggcgggagaaaatgacctagaaaacacaaagtcccaagcccccggattcgaaagacctataggaagtcagtgaatagagagaaatatcaaacaaatctcacccattcacaaggacttactggtcgagtagaaaacaagccaaaacatcaagcacgacgcaaaaaggggtaactttgggcaactaattaacggatacctccgtgtatcaggcaaagccgccaccaacagcaaattactgcccgataggtagggcgtgagaaaatgacctacaacctccaagacccgagcccacggaatcgaaagacctataggaagtcagtgaattgatggaaatacaaaaccaaatttcttccattcacaaggacttactggtcgagtagagcacaagccaaaatatcaagtatgacgcaaaaatgggtaaccttgggcatccaatcaacggatacctctgcgtatcaggcaaagtcgccaccaaactgtactactccgaaaaaaccaagaaacatgattttcccactccgttaaagcatctcaaccaagctaaagcggtaaggttatcatgtcaaaaggtgtagctacagcaacctaaagcccgaaaggtagggccgtataaaaagacctacaccctccaagacctaaacccacgaactcgaacgacctacaggaagtccgtgaatggagagaaatatctcaccaaatctcttccattcacaaaggctaactggtcaagtagagcacaagctaagcctccaagcacgaagtgatatgggtaatttaggcaaccaatcaacggatacctccgtgtatcaggcaaagtcgccacaaacactgtactactccgttactcccaaacacatggatctccttctctcaccaaaaagctttataaccaagctaacggtggaaaggacatcatgtcacgaggagtagctacagtaacctctctcttgagactgcaaagtcgaggatggattgggaaggccgcgaggcaaaaggcgggtaactcggccagacgctagtgatcttcggatccgacagccctggccttagaggaaccctgggataaggagcacgacgggaaggatgttccgcaaggatttcccttcccattagtcagggctggcagttggtaatatagcctttctacacaccaccgtcttgcacccactaaaccagtgggatatgcgggtggactcaatgtagaaaggtgttcccactgcctgactcgccaactttatatgtcttgtcaacataatggcccctcactataaactccctagcaactggtggtccggcgaagccggttcttgccactattgcgccccaggctcgcc

SEQ ID NO: 1053 - DNA, 5821 bp, Schmidtea mediterranea
  source 1..5821: mol_type = unassigned DNA
ttaaatcatttttaaatgtgtttgaatatcttaaattatcaaatcatattaatatcaatgctaaaaaaaaatcgtgckcatcaggcgcacgaaaataatggacacaactcgtcgacctgctgtcgactcacagagaacctcaatttggaagaatgggaagcctataatgctacaattccgccaacccctatttgaatgacagatagtcaaatatcaaaaaatatacaaactgctgtcaagcgtgactcacttccttccaatcgaaaaataggaakatgtaagaaacatgaaagtcaagctgaaaaaccaataatatgtcctaaaataaaacaatttgaaaatatgcaaaaaatacctataaaatcacagccgaataaattcccatccgttctaagcagaaaccgctacgaactactgcaagaatcggatcaagtatattaatttccccccmgggggaaattaatatacttgttakaaaattaattttttaataaaaataaataaatcgaataaatataaaataaaaataaatcaaattaaacttttattaacaataaaatcgcagtaagtaaatttccactgttattaaatttaaaacaaaattcctttaaaaatgcctctctttttcagtaataacaccttttcttgcttttattactatttcttgtgtactgtacaaatcgagcacagttattgcaaataggacatagaaattcctttttaagtaaatttaaatccatgagaaataaaataaaatccttttgattcaaagtttctatgttgctttctaatagaatggtgtaagcattaatgggtcttgatttttataaattaaatatatttaatctattaaattaatatgtttttattaattattaatttttatagtggggggaaattaatatacttgatcccaagaatcaactgatgatgaagaatatgttatttcaaaatacatacaagaagctggaaaaaacaaatcaatcgctacaatgaatgtggatctcgatgcaacaattaaaagtattggaatgaacacaaaagagacgacctatccaaattcacaactgcgagttgagacgactccctgtacctcaacgactattatgcatgcatcttgcaacacaaccagcactatatcttactctccattaccatcggctgtgtcacttcccgaaagccctgcctcgtcaatcacaataaccacaacagacgataattgcgatattatagagaccccttacccattacctcaaacaaatggtgacttgagtgaaatattaaaggatatagaagctaataaggacaccaccatgtcgaataaagtattggactgtgactctgacagcggcgatgatcgggacatgataatagaaaatgaccgagaatctgacatggacctgttttcgcaatctttattgaacactaatcaatctgatgagaggagggagaaaaacttaacagaaaatgctccaacagagattactactgagaagagctactttgatatcatcagtaaagcatctgataatacaacctctaagaaactgcttaatgtaaaaaacgaattgactgctggactacctcctatgcctccagtgaccaatactgcaaaattcattcgaaatgttcgacctgaggatattgcagatcctaccctatatcgacttgacagcaggggaaagcttggatgcagaacwcaatacaaaaaacccggatgcggggacatagcagtatatgactatgaggcgatagttgaacatgccgcatttatccacacaatcccatttaatgaacaaaataatgtggattgtcaaccatgccaccctaaaaaaggaaaagatgtccatacaatagttctgataaaatatgcagatatctttaaccatattgaagcccatagccacgttgtgcaaaccgcgattacagataacatgaaaacctatctacgtttaacaaaggaaaatttkttctactgctcatatcgtaacaacaaaaaaaagaataaatgcaaaaaggcttttaaccttgaatcaaacatgatggacataacagagcacatgaaaactcataccggatacagtttcgacmaaaacttaaacattctatgctattgtggtatctggaagccgttcacagagctcattgcccacatcaagactgagcatttgcaagaatatattaactcaataccaaacaaagaaaatatccataatactactaccatagtttcccctctaaactttgctgggatacttgcatctggcgaaactcaaaatatccccgatgaagaaataattaaacccagagatctgccagaaaatcttgccttcaaccgaaacatcgaaaatgaattaagttgatggtcgcagcacttggtcaaagcatatatcttctcttatgctgttaaaacatcaaccatcttcatcaatccttatacttgcaatgctttgatccagtgcaactacaaaactttctttgaaaccttccctttcaaagactttgccaagtggaacgagatagtcctgccaattcacaacaacacttcttcttggtccttcttcttcttgaacaagaaaaaacgagttgcgatgattatcgatccaactgcagatgacagtcataccctgcactttgaattggctacagatatcctaaggactatacttaacgtccagaatatatttgaggacttaaatttccctcttactgaggtcgaataccccgtgtgtcatgaggcaaacctttccgcattttmtgtatgccactttcttaaatgtttaatgtcggacttgccaattgatattccggatatcgatcacatgaaagagacwatgagaccaattattagaaaatataactgcgcaaagtttccggagagtgatgttaggaattaccgcgtacttatcgaggacctgatataccaattgaaccttgacacaattacttgtgaggaaatactgtgcgaaatcgaaagaataaatggaaggttaaatcccaaaagatattttaaagagagtaaaccaaagacggatataatacatctgcaaaagaaaaagtcggcggaactcctctgtgttaaaagattgaaattccaaatcagtcagaaaacagaaatcggaaagatatgggaaaacgacgatgtggatcacagaccgcctatggccagattcttgaagactttcgcgagtcaagactgccccgtttcgaatacgtcatccataaacctaccttactacatggatactgatacagatamgtgtactgattgtgaaaatttgtcgcacatcatgaagaacttggatagctcggcacctggaatggacctcattacaggtggagactggaaaaagatctccccgaagcatgaactgataacagcaatctgcaattgtatactacgaaataaggtctgcccagagaaatggaagctgtttagaacagttttaatcctaaaaccaggaaaaatgtccgagagtttcagagctaactcatggagacctcttgcaatcatggacacagcctatagaatctttacgactctgctgaataaccgcctgctgcaatggatcaggaatggcaacctcataagcccgaaccaaaaagcgattggtataccggatggatgtgctgagcataatgctactctacacttcgcaattgaccgagctaaacgatgtaaaactgaactacacattgtttggctcgatatcgccgatkcatttggttcgctgcctcatgacctgatctggtatacactggctaatatgggtctgaagaatgaaacactaaccttgattaaggaactatataaggatgtgaagactatcttcgactgtcagggaaccttgtccgaacctgtcccaattactaaaggagttaaacaaggttgcccattatcaatgacactcttctgcctgtctattgactacattctaaagtcaatactgactaattatcccttccttcttcatgatctgaacatcagtattttggcatatgctgatgacttggttcttctttctgactcttatctagaaatcaaaaaatctttagagagtactgtggaattggcagcmtttgccaaccttaagtttaaaccttcgaagtctggatacttgtccatcaacaatgttaactccgatatccttaaattacatctctataatgaggagataccaacgatatccgagaataacaaatacagatatcttggagttgacttctcttacaaaagaaatcaggatgttgatggacgacttgggtctgcacttgcactcaccagatctctatttaaatcatacttgcatccggcgcaaaagctgaatgcttacaaaaccttcatccactccaagcttatcttctccttgcgtaattgcgtgataggtcatagaatcctcgactgtgatcggaatagagttacacaaggtcgggaaaaacagctgggctttgatcaggaaatcaaggcactwctgaaaaccatgattggagacaaatttcaggcaktaaataactactttccttacactcactgcaagctggggggacttggtataacctcagctattgatgaatatttgatccaaagcattaccggaataacaagattatttcactcatccaacctcagcttcagaaaaatgctaatcacagaactcgctcattctagaggagggaaaaactttgaagcggggctaaaatggcttaactgtgaagttaacaaggcattccccaacacctctttctttgtaaaattccaaaaatcggcacttgctcttaaaagaaagttctgtatatgcgttaaccttaaatttgtagaggacaatttctcacttgagatgacctacaaaaagcgcacttcttatgtaaaccatcaaaacctcagcacactttccaaagaactccacgacttcgtgggcctttactatgcwgagcaatgwtgtcaaatgagagtacaaggacacattgcgactgcgatcggggatagcataacagctaaatacctaatagctagtgacatccttaacgacgcacagtactacttcttggtacgtgcgagaaataatcttctgaatcttaactacaatgcgtatcgactcaagtataatattggcacaaagtgcagactttgccaccttgatgaagaaactcaggcccatstgttcaatcactgccgtgccaaaccaaacgctagaagagtgaaacacgaaaatgtgctagtaagcatagttgccttcctagagaaaattggatttgagattgatgtggaaaaatcacccaaatatatctcaataccaacaaagctgaaacctgacatggtaattaggtctaagaggaataaagatatacatgtcctagacctaaaagtgccatatgactcaggagaaggctttgaaaaagcgcgggaagacaactatgttaaatacaaagatctagccattgaaattggaaaggcatttaatcaaaaagcgactatatctgctgtggtgattggatgcctgggcacatgggacaagaagaacaatgccgctctttccaaaatcgggttgactaagaccgagatcatatctcttgccaggatagcatgcccaaatgcggtaatcgcatgctatcacatataccgtgagcacgtctcatttacaaagagtgccatggccctccccttcagccttgcatgagtgtgctacgaggcagcgctggtaattgcatcggcgttgcagatttgtgtacgatagataaaaaccaatagtaataaatgctgagcctagctcgcatatctaagccgaaaggcagcatatatatgagacaatttaaaaaaaaa

SEQ ID NO: 1054 - DNA, 4814 bp, Girardia tigrina
  source 1..4814: mol_type = unassigned DNA
gtaggtaactatgactgcaaaataataattctacacctattgttgataactcatctcgtgcgcaaacggagcatgttatttctaatcatttcgtcacacaggattcttctaattctgatagtaatattatagatagagataggaaccttgttgatttagatgcgtcaataacttctcctactattatacagccagaggatagtaagatatctgaggatgaggacttcatcttagtcaataggaaaaagagcaaaaataagaaaaaatctaagaaaacaactgaaaataaaaatgaaattcctattcaaaagagtaaagataagaaaaagaagtctaaaattaataccgaaaaactaactgaaaatattactacttctgaaataccacttgaaattgctccttccatacctttaccttcagcaagtacctcgggttctcaacaaccggccaatcctccagaagacgctactctaagtgatacggatctcttccttacacaggatgatcccgatagtcttattctttctggaagtactcaaccaacctttgttgacctcaacccttcacagcaatcggaacttccttcaaatactgacagccaaagatttgaggcgggtgaaacacccaaaatcataacttcttacagggatgaccttttctactctacagtccttcactacaactcagatacaggttacggtataagtgttgacaatggggagcagaggtttcgaattcttgctaggaatcttgtcaggaaaaccaaggataagttcccctctttatatgctggacaagtaattagacacacagtcttcttcaatcacttcaaccaggcatactacgccaataatataactgatagtaaaggtaatctaattgagttttctgatgataagccttttcaaagtataccgactgacccaaaaactgaactagagcaaattaggagagagagacaacatctagttgatagagctcttagacataatcagttacgggaaacttatattttaaataaacttaataataataatggggggggtggcgaacatttgaaaaggaaaaagatcaaagtcaatacggatgatgtctccagcaatgatggagacagaaaacatagacgacaggaagaaacctcggacaatggagctgctattcccgctcaatccaacaatcaaattactcctttaaactgagttcgactgaagtgggagagctcgttgagcaatctccagctccccttcagtcgcctcagttctctaacaattataacaatctaaatatcaacaacaacttatactatagtctcaatacttttaatcagtctaataacctttgctgtcttgttaatattgagtttttcccaactcaacaccttcttggtgatatagttaactcggggtgcataaactatatgaataattataataactttgataatattaatttatatattaatagtaatgtattatcttacaataattataatcacagttttctcgcttccccatatactactaacatcacagaacatgcagacataaacatgcacgtgcaagaagttaacatgcagcaagataacaatacacaacatgctataacacaacaagtctctctacaagcaacatctctgcaacacacgttggacgaaatgatagtccagtttaacactgctgtcaggttaaagaaaaagcacaaagttgcaaaaatctttaggggacataatcatcgtaaagaccttccaacattgcctgctagggaacagtataaaactaaaccgaaacttgcaattagagaggtacttcatcgaaaaacaacagctacgtcttccccttctgaaaatgcaattaaggcttttttctcctcctacagccgtccagctgaacttttcactggtcaggaacttcttgaatcatcttggttcccagtacacccggaagatgactttgagtttagaattccgggtagagaccaaatagcgaaatacatcaagtttgctagtaaatcagctgctggtcttgactggatcacgtacgaggatattaagttaggcgatccgtccggggaaattctccaacccatttttgaatatatagtacaaaataacatatgcccatccgaggggaaggctagtaggaccattatgattcccaaaccgggaaaaagtgactattcagatccttcttcttggcggcccattacaattaccagcgcagtatacagacttctcatgaaatatcttacatgggagctgtataactggattcttcttaatcagatgctgtccaggagccaaaagagtttagggaagtttgagggatgtcatgatcacaacgcaatgttgaacatgctcatccaagacgttaggagacagaccaacccgtctaatccaatcaataagaataagaggctatacatagtcttcctagactttacgaatgctttcgggtcggttccgttagatactctcatgtatgtccctcaacgctttggcttaggcacctctgctttaacgctgattaaaaacttatatctagataactacacaaatgtaacatgtggggaaagcaaaatagaaaacgtaaaattaaataaaggggttaagcaaggctgccctctatctatgctgcttttcaacatttttatcaatattataattagggcaatagaagctatgccagatgtccatggatacccacttggagatatggacatccggatactggcatatgctgatgatattgctctaatatctgactcccacaaagacctgcaggaaatggtctacaaggcggaatatatcggtcggattcttggactactcttcaacccgtcaaaatgtgcacttatggacattccgcacgacaagaagaggacgccgcctatcctcgtcaacggtgagatgatcaagtgtgttggaaaggccgacccatacaaatatcttggaacctttagatcctggttccggaagctggatataaaggagctcctccagatgatgatggatgagactaaactcatcaccgagtcaaatctacatcctcaccaaaaaatccacgcgtatgagaccttcattcacagccagctcccatttcaccttagacacagccgaattccgttctcagacttcataacaaacagaaaaacaaacaaaacaacaaacaattcaaacgactcagaaaaatctatacagaaagcctacgatccggaatcaggacaattattcctcaacaccttcgcccttccaagtggatgtgctaaggatttcttttacattacaaaagatgcaggtggacctcaactcacaagcggactggatgagtacttaatccaatcaattatgtacatcttccgactattgggcagtgaggaccccaccttaaactctgcaataaaacatgatctcatttcccacttaaatttaaagggttttgtaaatattaatttttctcaagccatttcaatctttaattcaaattttaccgaccgaaccgatcacttttcacatcttagccgcactgaatgggcaagacttcaattagctcggaaaaaattgaagtcaaccttagccatccaaactaatgtctgtctgataaatgggcatcttgtcttaactctttcgctagaaaacaacgttctgttaattgatagtaaagaaaagggggatgtcaagaagatccatgcatccctcatggggtttcttaggttagctcaccttatcagactgcaaaaacatggatggtcaaaactgctcttcagtgcgaccactcatcacgaaatactaaataagcgtatcttgaatggtcacgtcccttataagatttggtactttattcatagggcgcggctggggttgttgcctactaaactctttagtgttagtaacctttgtaggaagtgcggggggaagaaagagaccatgtcgcatgctttggtcaactgtccaatgatgcagaccctcattaatgagagacatgatgctcttgaaatctcccttgtacaaattctttcttctaaatttcagggtacggttataaggcaaaagacctatgtcaacgagttaagacccgatatcacaatggaatcggatacccaatattatcttgttgaggtaaaatgcccctttgacacgaagatgagttttgaattgagaacacaacaaactactgataaatacaacattattattgaaatattagaagatgtacaccctgggaaggaggtgcgccttgttacgtttattgtaggcaccttaggctcatggggcccgcagaactcggactttttgagagatctgggattctccaaagacgaaatcgaccaggtgaagacgcggctgatgcttcagaatatcaattcctcctgcgagcagtggaaaagatttgtgcaatatgcacccacaattacacctgggccgattccagacgcggagagcgaggacgatcaggggacgagcgacaatgggccaacagctgctacagtgcaaggaccggtgattggcgatgaggaggaggaacttcaaatctacgattccggccttgacgagtccagcgatgatgaacccgacccagatgatgctgaattacttttcacaattgacatagaacaatatttgaattctgtgataacagactgatccgtgtgtttgtgtcgtatgattgtttccgtgtgtgtctatatttttcttttttatactttcaattacctcgttgtaatgttataacttcatatggaatatatgtaatttagtttagtttagttagtttagtttagtttagtttagtttagttagtttagttagtttagttagt

SEQ ID NO: 1055 - DNA, 5154 bp, Chrysemys picta
  source 1..5154: mol_type = unassigned DNA
  misc_difference 576: note = a, c, t, g, unknown or other
  misc_difference 1267: note = a, c, t, g, unknown or other
gtttaattccttctgatggacatctgcaacacccgtcctgaagatggagtctcctgcwkccatttttgaaaaaattgatgctgccttgmagatatactccgctgctgctgmtttggawgamaattctctctctctctcacctwcagmtgcastcwcgtcamctsctgctgctcctgcgtcctctactccccagaaaactcagwggaagcctatcccgaakaccactcttggtgcctcacggaagamcmggaccaccascaaggatgaaaamatcagsasctggckgaagaaagcccctgtggatacctctkcagggagamctagcaccagaaggacagctcttcgggacctcacatccaggagcagkaatatcwcamcagctcttcaggaggaggacccccggagaacccctcccwcttcccgggaccaggatgctgagcgccgccctgctgctcctgagaaggctgctaccagaggagcccccccgacgatccaggaccaggatgctgatcgctgccctgctgggagggatgccaccggaggagccccccgacgacccaggaccaggatgctgancgctgccccgctgggaaggatgccgccggaggagccccccccgacgacccgggaccaggatgctgaccgccgccccgctgctccagagagggatgctccmgaaggaaccacctcctcaaccccggaccccgaaaccacttaccacccgcctgtccggaggagggccgctccaaggggaacgcactccgsagcccwggatctcgatgccgcacgctgtccttccgggcaaagagacatcgtggccagtgagtccagcacccccccaggagcgacttcacctcctcaagcttctctgccagaccsagaggaatcacctgccgagtckgcaggcacaacagaggtccgccccacagagggtgaggcaggggaagacgactgcatctacctccagtacccgmtccctacaggcctcctcctctgccccttctgcctccccktccatggagtccagaccctcggggccctcagcaaacacgttcgkaaggcccacaacaaacggattgccttccggtgtagccgctgcgatgcaccmttcgagactcaaaagaaatgcaagtmccatcamgccacatgcaagggacccctcacaaccgcgaaggtsaaccccactgacaccctgcgggttccaaccccgacccccaccgacggtccagcttcagcaccccagccagcatccccagagccacagcangtaaggggggaccaaccgccaaccgagggaagcgcaacccccgcctcgaggactgacgatgccaccaaaaggaccagccccgcctccagaatccccacgctggaccctgccgtgagggggatcaccgccacctcscaggtcagcgacctcaccagatgcctcagcgacctcataaaaaccatccggcacaacacggatacgagacggkgcagcgctcccccacaggtmacctcatgccgccctgccgtaggagcaactagcactgccccccaggccgcacggcgagacccagccaacggaggagcctcccgcagcccccagatcccacggccggaccccgcccccgggagacccaacacctcctccaaggttacccaacgagactccgaccgccaaaaaccccatgccccaccgaggaccccccagccggataccacccgcagaagaaccagaaccatccccagcgcttccaaacacgaccgcgcccccacaaagcccaacaccggtgtttccagaaccccactccctcccggaagatccagcgctgcctcggagacaccgagagctgccccccccccaccgcaccaggacccccgcctcaagacccacctgaacaccgctccccagtccgagggacaacaaggccacagactgtctccgcagcacctgaacccgcggagacaacgcagcaggaggaacgacggccgcgagcagagggtcgccacgccgtggcaatccgcctggatggaggagctggcaaaggctgaggacttcgagaccttcgacaccctgatggacagactgaccgcagaactgtctgcggaaattacagccagaaggagggaaccccaggaggcctcacgggccacgcgcagattccccgcgccgacccgtaacaacactgccagagaaggcaggagaggggacgtcggccgccgctacgatccggcagctgcatcccgtattcagaaactatacaggacgaaccggacgaaagccatgagggagatcctcgacgggacctcctcctactgtgccatccagcccgagagactctactcctacttcaaggatgtgttcgaccacgaggcccagaccaacttgcaacgcccagagtgccttctcccgctaccccggatcaacctcacggaggacctggagcgagatttttccccgcaggaggtgcaggcgaggctgatgaggaccaaaaacactgcccctggaaaagatggcatccgctaccacctgctgaagaagcgagaccccggctgcctggtgcttgctgccatcttcaccaaatgcaagcagtttcatcgcgttccccgctcctggaaaaagtccatgaccgtgctcatccacaaaaaaggcgagcgagacgaccccggcaactggaggcccatctccctctgctccaccatctacaagctgtatgccagctgcctcgcggcaaggatcacggactggtcagtgtgcgggggcgccgtcagctcagtacagaagggtttcatgtcctgcgagggatgctacgagcacaacttcctccttcagacggccatccaggaagccaggaggtccaagaggcagtgcgccgtagcatggcttgacctgaccaacgccttcgggtccataccccaccatcacatctttgccaccctgggagagttcgggatgccagaaaccttcatccagatcctccgggacctctacaaggactgcaccaccaccatccgcgccacggacggagagacggacgccatccccatccgccgcggcgtgaaacaaggatgccccctcagccccatcatcttcaacctggccatggaaccgctcatccgagccatctccagcggcccgaccggcttcgacctgcacggcaagaaaatcagcattctggcctacgcggacgatctggccctggtcgccgacagctcggaaagcctccagcaaatgctcgacgtcaccagccaagccgccgagtggatgggcctccgcttcaaccccaaaaagtgtgcctccctccacgtcgacggtggcgccagggcgctggtccggccatcacgattcctgatccagggcgagcccatggcctccctcgaagagggagaggtataccaacacctcggcacacccacaggagtccgcgtccgacagacccccgaagacaccatcgcggagatcctgcgagacgcggcccaaatcgactcctccctgctcgccccctggcaaaagatcaacgccctcaataccttcctgatcccccgcatctcctttgtcctcaggggatcggccgtagccaaggtgcccctgaacaaggccgacagcaccatcaggcagctggtgaagaagtggctctaccttccccagagggccagcacggacatcatctacatttcccacaggcagggcggcgccaacgtacctcggatgggtgacctgtgcgacgtggcggtgatgacccacgccttccgcctcctgacgtgcccggacccgacggtgaggagcatcgcgcaggaagccgtacgggacgtggtcaggaaacgcatcgccagggccccctccgagcaggacatcgccacttacctcagcggctccctggaggctgagttcgggagagaggggggagacctgtcctctctctggtcccgcgcccgcaacgcctcgagacgcctgggtaagaggatcggctgctgctggaagtggtgcgaggagcgccgggagctgggaatactggtgccacgcataaagaccccggaccacaccatcgtcaccccgaccgccagagctatgctggaaaggaccctgaaagacgccatccgctgccactatgccgagaacctcaagcggaagccggaccagggcaaggtgttcgaggtgtccagcaagtgggacgccagcaaccacttcctccccgggggcagcttcaccaggttcgccgactggcggttcgtccacagggcccgactcaactgcgttcccctcaacggagccatccgccacggcaaccgggacaagcgctgcaggaagtgcggctacgcaaacgagaccctgccccacgtcctgtgtggatgcaaacagcactccggagcctggcggcaccgccacaacgccatccagaaccggctggtgaaagccatcccgccgtccctggggaagatcaccctcgactccgccatccccgggacagacagcagactgcgacccgacatcgtcgtgacggacgcagaaaagaagaaggtcctcatggtagacgtcacggtgccttttgaaaacaggtcaccggccttccacgaggcccgagcacggaaggcgttgaagtacaccccgctggccgagaccctgagagcccagggctacgaggtccagatacacgccctgatcgtgggagccctgggctcgtgggacccccacaacgagccggttctgagagcgtgcggagtcggtcgacgctacgcccggctcatgagacagctcatggtgtccgacaccatcaggtggtccagagacatttatacggaacacatcacaggacaccgtcaataccacactgagtaaccgagaccgccgaccagggaaataacccacttccttccctgacgaaccaagggacgcaccccacccatgtacttattcgctacaccgatactgacttggactccttatacattccatgggtggcgtacccgagcccacttatccactgacactttaaaaactcttgcaccccaatctgggtctatgccggttatgcgatatgtatgtatctcttcatccttgcaaccgatacctgtaatccctcataacccaagcctgaccccagatgtacagtaccttccctcttaactcgtgtatatttaattttaaacattaactttaataaaatttttaaa

SEQ ID NO: 1056 - DNA, 4287 bp, Acanthamoeba castellanii
  source 1..4287: mol_type = unassigned DNA
cccgtcaagggtgctccacgagatccctgtcgctagccgaccggttttaccaccccaccccgcccggacaaccacggaccctgctccgcagcaggaccccacgcacgatggccgctaaatccgtcgcctgccctcacgatggatgcgccaacaagtacgcgtcggaagcctccctccgaagacacattaagaacaaacacgctacagatgaggaaggagatgagacctcacactcctgtccccactgccaccgacctttctccaccgcccgcgggctcagcgtccacattggcaaatcgcaccgtcaggccccccctgagccgacgcgcccccccccggccccggcccctgccgatcccggcctcgatcccgaccccggccccaccgtgacgccccccagccgtgatgacgaagaccgcgaggaacccgacgacgaccccgtggagatcgcggacctaagctgccctcactgcgcccaggccctcccgtcggcccacggcctcgccaaccaccttcgcgcctgcaaggaccacagggtccccgcccctggagcaccccgctcgggtccgcccagctccaggtactggactgctgtcgagcaccaccgctatgtggaggccatggcgcgcttcgcggatcaccccgacctacttgcgcgcgcggctgcccacatcgggacccgcacgtacaaacaggttgactcccaccgcaccaaggtgatcgcggcggagcgcgagggccgccctgtccgcacgctcgaccccacgatggactggcgcatgcggccctactgcgccagcaccacggcccggtggctggctgagcaggggcgtagcccagtagcgccccgctcgccctgccccgagccccacgccccgccgcctgcagccgcgctgctgtacatcccggccacgccccccgcgccaacgccccgtgccccagtggcgcctcccaagcttgcgcctcccgccgagagcaccgtgcccgccacgcccgatgggaatccggaggcgccagcacccccgtttagcgcccccggacctcccacccccaaggcattgccgcccccgcccccgtcccgccgcaacctgcgccctcacctcgtgcccaaggatgcttggcagggggtcgccgatgccgtcgcccctgccgcctcgcgcctcctgcgcacgccccttgcgcacctctccaccgagcagtgggccacgttcgaagccgccctcgccggcctcgaggctacgctccaccatgccgcccgcagtgcagaggcggtgcccacacgctgcgctagccgagcaagggaagacgccgagcgccaactccgtgaagcccgaaagacgcgtgagatctttggcaaggccgctgccctctacgcagccggcaaggaccccactgccaccatcgagcgcatccccccagaagtccgcctacacctgccaacccctggctcggctgaatggcccgccagggcggccgccgcccgcagggtgatccgccgtgcagtcgcgcgagcggaccggttgcgcaagcgcatgggcatcctcgatagcgaccgcgacctccaacgcctcttcaacgctaaccagaagaaggcagttcggcagatcctcgccccgtccaccaaggcgccgcggtgccagctagacccagccgccgtcgaggaggcctacatccagaccctcgccaagccgccgccgatcgaccccagccccccgtggaagaactccgtccagtggccccgcccgcccactgccgccgatgacggaggcagccccttcagcgtcgccgaggtccgggcccagctccgccgactgcccaacgggtccgccccagggatcgatggcataccgtacgaggcctacaagcgtacgaaactggacgccacgctcgcccatgtcttcgaggtcgtgcggctgaatgcgcgcctgccagctcgatgggatgtggcgcgcacggtcctgctctacaagaaaggcgaccctaacgacaccggcaactggcgaccgataagcctccaggtcaccatctataagatcttcacggccgccctgtcgaagcggctcatctcctgggctggcaagcacaacactttctccgcatcgcagaagggattcctaccggccgaaggctgccacgagcacgcgtttgtcttgcgaagcgtgcttgacgacgcccgtcggcacaagcagaacgtgtaccttgcctggtacgatctgcgcaacgccttcggatcggtgtcgcacgacctcatcgcctggtgcgctgccatgttgggcctgccccgctacctccgggatgccatcggcgcaatctatcggcactcagcgctcttcgtccaagttggggatcaggagaccaccggcgtcattcctatgcgctgcggcgtcaagcagggctgccctctcagccccctcctcttcaacctgtgcgtcgagccggcccttcgctgcctacgccgcaccaccgggtacaagttctacggcacgtcgatcaccgtcgagggccaggcctacgccgacgacctgctcactgccgcgccctccgcctaccatgcggcccggcaggtggccacgatcgaggaatgggccaactgggcgggagtctccttcgtcgtccaagccctctccctggatgcgccggccggcaagtgtgccgccctcgcgatcaacttcgaaggtggtctaatgcactctatcgaccctgccctcaaggtccaaggcgcagccatcccggccatgtcaagaaacaacgtgtaccgctacctcggagtacatgtcggtctcacagatgcgctcggccaagcgaacgagctcctcgagaaggcctcacgcgatgcacgcacgatctgtgcctctggcctcgaaccctggcagaaggtggtcgcaatcaagaccttcatcctctcccggctccccttcttcttccacaacgggaagatccagaggggccgatgccagcaattcgaccgcgagcttcgagaaaacctgcgggccgccctccgactccccgtctgcaccacgaacgccttcttccattcccgcgtggcctcaggcggccttggcatcctgcccatcgcggaagaacaacaagtctacctggcagcccacgtgttcaagctcctgacttcgccagatctgtcgatccgcgccatcgcccgacaccaacttgccgaggtcacccacgcgcgacacaccacgccagtccaggacggcgaagcgtcacccttcttcggatggctcatgcgggggcaggaggtcgcatcaactaccccctcgggtgacgtcagttcaatctggttcgcagctgcaggcgcctactcgaggatgggatggtcagtccgcgatgcactccacccgacgctgacagttggtccgggcgtccaattcgagggccgattccaacgtgccaacgtcatcccagctctccgggctagcgccttttcccgccatgctgtggaatggagtgccctccgcacccagggtcgagcagcagcctaccaacatgccgtccaccctgcaacgcaccactgggtccacaacagcgctggcctgacgaccaaggagtaccgattcgcgatcaagtgtcgattgggtctcctgccgacgcgagcagctccacaccaccgcaatgggccaacagcgtgcagggcgtgctcctacgcccgcgagacggccaaccatgttctcggacactgcccggcgaccaaggccgaagtcatcgcgcgccacaacaggatatgccgagctctggcccaggcggctgaagcctcatggacgtctgtccttgaagacgtcccgatcccgggggtggactcccccctacgacccgacatctactgctctcggccgggccagtgtgccatcatcgaggtcgcggtctcctacgaggacgccttcaacgcttcgatggagggccgggcgaagcagaagaccgacaagtacgctggcctggctgctaccgtcgaggagcagctgcggctccaaacccggcacgcggctttcgtggtgggcttctctggcgtcgtgctcccagcctcggtaaccgctacggccacctcccttgatctcccccccaaaacttggaatgtgcttcttaaacgttgtgttgctgcctcaatcaaaggcagttacacagcgtggagaagattccggcgctctactccataacaaccatgtatggtgaaccacacctctctcgatcttgtattctgtgattggacatcagagttcctgcgaagggatacactctgccaatctcgtgggttgtaataaatccacaccttcaaca

SEQ ID NO: 1057 - DNA, 6514 bp, Acromyrmex echinatior
  source 1..6514: mol_type = unassigned DNA
ggtgcacaacggatgcatcatacgtgtaccggagcatacgggctgtcacggcggctgcatgcgcgatctagctcggagattttatttatttatttattaatttatttatttattcatcgagtgtgagtgttcgcgttttgccgagaagcgattttcgttaagtgatacgcgccgcgttcataggttaggtgtgcagtgtacgtggctgtcgtcgcgaagattctcgaagattctacaagttcaaatttccgttaaatttcgttaaagttcctaaaaccatcgtgatcgggagtgcgttccaaaaatcatcagtttcggctcgttcgcaaaaccactcccggtcgacccgcgttccgaaaaccagacagccacgtacaagcaatacgattggtcggtacactgccgcgagtgcgaataactatttaactgttattattactggaaattacactgtattcgcccagtggatctgttatcgcgagtgcacttggcttttaagtaaatttgttaattttttcttaactataattggatactttttccaattgcggctcgtcgttatttatgaggggccagtkatctaaggcccttttagtcagactaaaccgtagtgcactcgccatggcggatccacaagtgcactatatagactacccgctgccccctagagtcaaatgcgtaaaatgtttcggtgctgagggggcaggcaaagtaaagggcgaatacagcgacccgccgcatttagcaaaacatctgaaaaagtgccacccgggagacacattaaattataaatgctcaatttgtgatctaagggggaccggtaaatacccccttagagatgttaaggcacattacgccgagtgccatgtgtctcccgcagtggatgcggcgggtccaagcactcgcggcagcctcggcgagtgcagtggtgcgggtcaaccgacagccagccgcgcggctaaagcgaccacgcgattggcggagacggttgggggtacggataagcgccgtgccgcgacatcgggatcgcggcaactcacgctgccgttcgcagccaccccatcgccatccacagcagccggtgaggcaagggccccaagaagcgmgtcaacgacaccgacgagcaggtccccctcatatgcggcagtcactgcgggcccgccatcgatgaggagcacgacaacttccaccacagcccgcagtaagactgtcgcgaaaggcgccgcgcccaacacmacgacgacgacaacggccaggagatccggcgaggccgccgcaacgaggaagccgcctacgaccgccacggtgagtaaaccgcgtgtgttgtcggtagaaactgttaggttgcctgtcgacgacatccagcgagcaggcgtgcaaaacgcggccaaaccggcgcgcgctccctctcgccccccgcagagaacatcaccggaggcggggggtccaagaacaacgggcgcaaaggagaaatgcggagagggagcatacaagaagttgcccgcaaacagcggcaatccaatttcaaccaggacgaggcgggcaactagcgtgccggttgagaagagcgaaggcacggcaagacgggagcgcgtctccccacaccctcctcccaaaggaattgatatcatcctatcgtcgacatcggaggaggagggcacgccataccagcccggcggcgtggggagactaagactaaggaggaaaaaggtgaccggaccacccccaaagatgacacccagagagggggtggtcacaagagccaggcggtccaccagcgctcccgtcgagaagagtgccttggatgcacgcctgacggctctggaccggacatcgtccagagcgacaggcaacccgacgtcgcaaatcgcagggggcctttacaccagtagaggccaaccggagaggacgccccctgcgaggctccccagcctgtctccgaccaccagaggcagtccatcggggagcctaggcgagatacggacacccatctcgcctgcgacgtcgctaccggcaacgctcaccacttgcacggtgacgacgaccacctgtggaagccccataacatccacgggcttcacaggtggcgtggggaggctgataacaccwccgagcctcccccaaacgaacatcctcccgaccatcggggaggaaggaacgtcaccgtgcgtggcggtcgtcaccacccatccttaggcggcaggagcacgtctccgctcatcctaccaaggccaacgacaccggagcctgagcggggacaagaggagcggcggctagaaggcgcggcgcagccacctaccacacccgtcgtcgagggggacaaccagtgggatggccagtggacggtgagcgtgaggagaagagcgaggaggcaacaactgaacgatacatccccctccaactccgagtccccgccaaccgctggaccatcgcgttcgccgcgcatagccccactatctgcgctgatagcggcgtcgacgagccgccatgagaccagcttaaatctcaattgcacgaacggcaatatttgcatggaccgaactccgccccgtaacattttgccggtargggcggagcgccgtcgcgagacatcgccacaggatcgcgtggagggagacatcggttatggtgctggaaaggtaagtgccgaacacccgagtgctcccgtaaatgtccgtggtgtgatgtctcgagggagagcaaccgcgtcatccatcgtgccaccgcgagccaaccgtggggagggcggtcggcagcatcatagtcggcggcgtccggacgctcctgtcggtcagccgtcgcgggatcacccggcgcctgcgactgtcgcgaggcagcgtaggcgtgagcgggtggccgcccgcgacgcgctgctcgatcgggctaaggacgtcgctacgattgcggatctggaggcgttcgcggcttcggtcgcggcgttcttcggggaggatgcatcggccactggtgctgcagcccgcgctcgcgatcgttcggtacgctcacgggaggcgggtgcgcgtcggggggtgaagggaggtgagcgtccggagagagagggcgccggtaggccggggtcagcgccggctgaccccggagcgtcgggagaagcacgcggggactgggtgcgcgaggccaaacgcttgcaggcgctgtacagggcgaaccgccgcaaggcagtgcgagaggtgctccagggacctgccgatcagtgccaggtgcctaaacgtcaggtccaggagtacttcgagcggctgtacagcggcggggaagacctggctggcgccggcgtggaagccgaacgccctgacccctcgagtccgcgtgaggtatctgcggtcctgggtccgctcgcggagcgagaggtggaccgtcggctccggcgtatgaataactctgcgccgggtcccgacggtgtatcctatcgtgacctccgtggggcggaccggggagcgcggctcctcacggcgctctacaacatctgcctgcggctcgaggcagtccccgcgtcctggaagacctccaacactgtgttgatacacaagaaaggagaccggggcatgttggagaactggcgccctctcgctctgggggacaccgtccccaaactcttcgccgcgctcttggccgaccgattgaccgactgggcggtcacccgcgggaagctctgctccgcgcagaagggcttcctgcgggacgaggggtgctacgagcacaacttcgtcctgcaggaggtcctgacgcacgccaagcgctctaagcgccaggcggtcgtcgcgtggctggacctgtccaacgcgtttggatcgatcccgcacgcgacgatccgccgcgcgcttataagatccgcggtgccacggggtctcatagcgatatgggactccatgtacgatggttgcacgacgagggtgcgaaccgccgagggtcacacagcacccatccccatccggtcgggcgtccgtcagggttgtccgctaagccctattatcttcaacctggccatcgactcggtcgtccgtgtggcggccgagwcgaatgacgggtattccctccacggaaatacctggtcggcattggcttacgcggacgacatcgcactactggcccagacgcccgaggggatggagaggatgctagcctctgtggaggcggaggcagcgtcggtggggctgcggttcaaccctgcaaagtgtgccaccctgcacgtcggtgcggggaatggcggcagggtcctaccgacgtcattccaaatccagggggagacgatcaaccccctggctcagggtgagtcgtacacccaccttggcgttccaacggggttctccgtggaccagacgccctacgccgccgtcggggacatcgtctcggacctgcgcgctgtcgaccgctcactccttgccccgtggcagaagatagaaatgctggggaccttcatcctatccaggcttgactttctgctccggggggccagagtgttcaagggtcccctcacggccgtggaccttaacatccgwaggcatgttaaatcctggcttaacctccctcagcgagcaagcgcggagggagtctacatgccgccccgttgggggggatgtggactcctgccgctctctgacctcgccgacgtcctcacggttgcccacgcgtaccgtatgttaacggtgcgcgatggcgccgtgagggagttggcgtgggaatcgctgaggggagtggttgggcgcaggatcggccacgcccctagttgcgaggatatcgcctccttcctatccggctcgctggatggaaggatgaggggcggaggggaggcttcgctctggtcgagtgcgcggaacgctgcgctcagacagtccgagaggttgtccctgcgttggcggtgggtcgaggccacggaggagatgacgttggagtgtcgagggcccaggggggcagcgattaagattccgcctgaagcgcgcggtcaggtagtgaatcggttgcgctcagctgtagcagagcactacgcaagtaggttgcttagcaagcctgatcagggtaaggtcttcgaggtgtcgtcgcggagccgagtgagcaatcactttatccgcggcggcagcttcactcgcttcgccgactggcgctttatccataaggcccggttagatgttcttcctctcaacggcgcacgacgttgggaggccaacgacaagcgctgtcggcgatgcggtgaggtatcggagacattaccccatgtgctctgtcactgcggcatccactccgccgcgatacagctgaggcacgacgctgtcctgcaccgcctttggaaggccactcgccttccaggggtagtgcgggttaaccagcgggtggagggcgtcagcgacgaattgggggcgctacgacctgatctcgtggtcaggcacgagccctccaaaagtgtcgtcatctgcgacgtcacggtgccattcgaaaaccgctggaccgctttcgaggacgccagggcgaggaaaatcgccaaatactcgcctctggcagaggagctacagcggcgagggtaccgtgtcgtcgtgacggccttcgtcgtcggcgccctcggctcgtgggatccgaggaatgaggcggtgttgagactgctgcgggttggcaaccagtatgcagctatgatgcggcgcctcattgtctcggataccattcgctggtcacgcgacatatatgtggagcatgtgtccggcacccgccagtacctggctccttcccgtccctctggggatctcgcgacgccgccgagagcggttcgtcgacgctggctcgccgaggagagaagcgcacaggacgcggcgcgtcgcggttcggatagtgtgagtgtcgcgtaaattattttgtctttgtcttggccccccctttttaaaccaagcaggagagagtggcccaatgcccaactattatatattaactatttactgtgatatttattatttgactgttgggcgggcccctctctgctggttttatttatatatattttttactcgcgtactttttgtactactctatttttctttttattttagctatgctatttttatctctttctttgtctctattttctttctttttttctttccttttcttttctttcttttattcttcttttatttatctttttttcttttctgttgtggggccctgaccgtccgagtgtgaatgccgcgaaaaacaatattatgttttatacgagtgtgcatgtgcgtgatatatttatctattttattttatttatttattataatttattgccgcgcgcgctcctccgggacttttattcgttgacaatactgtgatatttttctgckcaggctgggggggcttgccccccagccccttagttttaattgcctatgcggggggggcttttgtcccccgcaaatgtatatatatatatatttagcgcgcggcttagccgcttttgtttgtattaccccagaggggaattgtccctctggggaaaaaaaatgattggaaaaataaagtgagctaa

SEQ ID NO: 1058 - DNA, 4729 bp, Alligator mississippiensis
  source 1..4729: mol_type = unassigned DNA
tgctggaaagacggagaaccgcttcctttttccctgcgcctggcctggtattgcagtacctccaggattagcgccaactagtccggcagactgtcggaatacagcaatagaaagwgagctgactagcagcttgctttccttcctccggtgcagcatgggttctcgtcagtcmtgacgggctagggaaggcggtgctgccagtacgtccgaaagagtgccggttgcgcaagcgaccgcgccactcaggtgagtagccaagggtcttacagttcaccggacccgawaacgcgaaaaccccaactcgggctagtagccgaagacctgggtcccccccmggtcagagtaggcgaacgccwgkgctcagaggacggaacgcggaaaacacccccaggtcccaaggacgccctgatccactgacaagaacgctcgaggcacgccaggagacccccagctagggtggaccgccgactgcaggtccggaggaccctcccaggagggtggaccagcgaacccaagttggcgacgaaccctgacgcaccccccacgatgtcaggaccccgacaggcggcggtggaccactgaccatcgaccgacccccagaggcagagagactctcagagcccggaaccccggctgacgagagccgcctcccggcggaggaccccggagcctgaggatgccccccggatgacggcggagcgccccgagcgacagcggacccctccggacccccacggcccctcggtgacgatggcgggccccgaacgacgacgacccccggaccccggcggtcccgaggacgccccccccgagggtctccccacgctggtggaggagccccggacccccccgacaccggacccccccacggacgacccaggcgaaggcgtagacatgacagcactcacgttcctccccttccccctcccggcgaagctgttctgcccgacctgccacccgccaagacagtacaggtcgcacggcgacatgaacaagcacctacggcgcttccaccagctgcgcctagccttctactgcgccctctgcggcaccgagtacgaggccctgaagctcctgaagaaccaccagaagggatgcgagggccacggagccgagaggagacccggcacgctggtgaggtccgctgccccggcccgccggacccaggccgcggtgcgaaggcccgccagactggccaccccgccgacaaccccaccggaccagacctccagggaccacccgacggagagacctgccccagtgatgccaccacgcaggcctccgcccagggacccccaaccggacacgacgccccgaccagacagcccccctcccagacccccggggccacccgatgcccccgaaccgccggggatcccggagccgcccggaggaaccgagccgccgggagccccccgkcccccgagcgtgccagggtctccgggtgtggagccctccccagcagaggatgcccaccccatggcaaaccctctggctggaggagctctcccgggccaccaccttcaaggccttcgaggcctcggtggcccggctcacagaggagctctcggcggccgcccggcccggccagccccgggggggcaacaacagaccggcgacgcgacgggaccacagactgcagccgcagaggcgacccaggcgccagcgctacgacccggcggcagcctcccggatccagaagctgtaccgggccaaccgtcccaaggcggtgagagagatcctggagggaccctcggccttctgccaggtcccccgggagactctgttcaactacttcagcagggtcttcaaccccccagcagaagccgccgccccacgccctgcgaccgtcgaagcgctgacccccgtccccccggcggaggggttcgaggatgccttcacgccgcaggaagtggaagcccgcctcaagaggaccagggacaccgcccccggcagggacggcatcaggtacagtctcctcaaaaagcgtgacccgggctgccttgttctttctgttctcttcaacaggtgcagagagttccggcgcacgcccaccacctggaagagggccatgacggtcctcatccacaagaagggagacccgaccgacccgggcaactggagacccatcgccctgtgctccaccgtcgccaagctgtacgccagctgcctggcggcccgcatcaccgactgggcggtgaccggcggggccgtcagccggagccagaagggcttcatgtcgacggagggctgctacgaacacaacttcaccctccagatggccctggacaatgcccggaggaccaggaagcagtgcgcggtggcgtggctggacatctccaatgccttcggctccgtgccccaccgccacatcttcggcaccctccgcgagctgggcctaccggacggcgtcatcgacctggtgcgagagctctaccacggctgcaccacgaccgtccgcgccaccgacggagagaccgcggagatccccatccggtcgggggtgagacagggctgccccctcagccccatcatcttcaacctggccatggaaccgctccttcgagccgtggcaggcggccccggcgggctcgacctgtacggccagaagttgagcgtcctggcctacgccgacgacctcgttctcctcgcccccgacgccacccagctgcagcagatgctggacgtgacgtccgaggcggccaggtggatgggcctgcgcttcaacgtcgccaagtgcgcctccctgcacatcgacggsaggcagaagagccgcgtcctggactccaccctcacgatccagggccaggcgatgaggcacctgcgcgacggcgaggcctactgccacctggggacgcccaccggccaccgggccaagcagacgccggaggagaccatcaacgggatcgtgcaggacgcccacaagctggactcgtccctgctggccccctggcagaagatagacgcggtgaacaccttcctcatcccccgcgtcgcgttcgtcctgagaggctcggcggtccccaagacccccctcaagaaggcggacgccgagatccggcggctgctcaagaagtggctgcacctgccgctgagggccagcaatgaggtcctgcacatcccctaccggcagggaggtgccaacgtcccccgcatgggagacctctgcgacatcgcggtggtcacccacgccttccgcctcctgacctgcccggacscgacggtaagtatcatcgccgccagcgccctcgaggagaccgcccgcaagaggatcgggaggcagcccaccagacgtgacttggccaccttcctcagcggctcgctggagggcgagttcagcagagacggcggggactttgcctcgctgtggagccgagcccgcaacgccacgcgccgcctcgggaagcgcatcggctgcgcctggacctggaccgaggagcgccgggagctgggagtctccctgcaaccagccccgcacgccgaccgcgtcaccgtgacgccccgcacgaggaccttcctggagaggttcctgaaggacgccgtccgaaacaagtacgccggcgacctgagggccaaacccgaccagggcaaggtcttcgacgtcacctcgaagtgggactccagcaaccacttcatgcccagcgggagcttcacgcgcttcgcggactggcgcttcctccaccgcgcccgcctcaactgcctgcctctgaacggggccgtccgcttcggccaccgggacaagaggtgccgacggtgcggctacgtggcagagaccctcccccacgtgctgtgcagctgcaagccgcacgccagagcctggcagctctgccacaacgctgtccaggaccgcctggtgagggccatcccggccgcagcgggggagatctccgtgaaccgcaccgtcccgggctgcgagagccagatgcgccccgacatcgtcatcaccaacgaggaggccaagaaggtcgtgatcgtggacgtgaccatccccttcgagaaccggcgccaagccttcaccgacgcccgggctcgcaagcgggagaagtacgccccgctggccgacatcctgaggggccgcggctacgacgtgacggtcgacgcgctcatcgtgggaacgctcggagcctgggaccccagcaacgagagcgtcctgcatgcctgccgcgtctcccgccgctacgccaagctgatgcgctgcctcatggtgtccgacaccatccgttggtcccgtgacatctacgtggagcacatcacgggccaccgccagtacaccgaccccaccagacgaaccgccgccggaccggacccagaggggaccgcctgaaccccccctctgcaccagatggaccttcacttcgagaggattcttcagcaatggacgaccccgctccacccgaagaggacccccgcgatgagactctatatggactgagacactttttcttcgaaccacttcctccaccattgcggaccattgtaacgggtttgtgtgtatctatcttctttctctctcagcgtcgcgaaccccctccctccccttcccctccccctcccccccacccccgggcttagttggctaacattgtatctcctgtaacctagttgcgttcccctcctcacccccatccctctattgttagtccctcgctcgggcgctctgtatttccctaccggctttgtcatcttttttggattcacaatcctaaacatctactaataaaagtcaatc

SEQ ID NO: 1059 - DNA, 5031 bp, Chelonia mydas
  source 1..5031: mol_type = unassigned DNA
  misc_difference 1806: note = a, c, t, g, unknown or other
ctcttcttatgaatacttgcaacacctgcactgaagatggattctccggctgctatttttgaaaaactgatgctgctttgaaggtgtattctgctgctgctaccttggaaggaaattctctctctgctcctgagacatccccagctgcaccgtgtaccaccaccaccactgctgctgctccacagaaggtttctcggacaatgactacaaagaaggtcctaggtgcctccacaacattacagaccagcagcacgaaggggaagaacagtggctgctcaaaggaccccctccgagatgctgttccaggaagatcctggattctgaggccggcctgtcgggacatcacaaccagaaggaacatcccccccgccccccagcagcagcagccgccaatggagagcccccccactctgcagctgcaagatgctctcaggcgaccatctcccacccccgcagctgcccaggtcgctgacgctggtggtgctctcgctgctctacacaccatcaagagaggaatctccgtagactggaccagcatctctccaaagascmcccagaggstcaccagcgcctcgccggatgcctgcccagcctcagaaaccacccagagggaccscaggwscctgctggacgcccgcccagccggacctctcgaccctacccgcccacaccaggatgaaccagccagcgataccgctgatgctgctggaacccccctgctgcaaggtaatgaggacaccatctacctgcagtatcccctcgctgcggacatgctcatctgccccatctgctctccgccccaaagcttccacctcctcggtgtcgtcaccaggcacctgaagagatgccacagcaagcgggttgccttcagctgtgccctctgcagcctgcccttcgagacgcagaagcaatgcaagatgcaccaagtcgcctgcaggaaatgcctcaagggaacmacacagtctcctgccccggctcccagccctcctgctgcacgccggcccgctgctcctgagcctcaacgaagaaagscgacctcgcaagctgccgtcaagaagcctgcccccgtcgccaggccagcggaacgggatgctgcgatcgagaaggtacctgctgcctcggggaacatcacccaggtcctcgccagcaggaggcccgtctcaccctctcatgtcgccaagmagatctccatgctgagacgactcagtgctgcctcgccacctgtccagcacgtccccgtccccagaaggatcagcgccccaccgcgcatagctgctcgagatcctgtcgccggaagagccagcgccgcccctcagaccgccctgcgaactccagccgccggaggagccagcaccacgcctcagaccgccctgcgaactccaaccgccggaggagccagtgccatgcctcagaccaccctgccagmccccagacgtccagactggaggaaccagccccgcagccacagcaaagcaccgggccttcatcgccagacggaccagcacggcccccaagtccattctgcgggacactgcctacgggagatctcacgctccagcagcaaccgcctaggcagcagccactcatagaaggaccggcggtgtcccagcaacccccgagccggaccgcgtctctccgaccaccagcaacgccascatcccgccagagatcccgccccagcacccaaccgaagggaatcctgacccacgagatagacggcaggccgaccatacagcaggctcwgagcctgcaccagacgaggtcgaggaccmtgagggccagcggccgatggtgagggctgccacnccgtggcagactgcctggaccgaggagctacaagcggcagcttcctttgacgacttcgacctcctcgtagacaggctcacccgagaactgtctgcggaaatcgctcccaggaggagttcgaaccaggagaacgccccgcctgcccacagaacgcctgctccgaaccacaacaccaccaccaggggagccagaagtagagacgccagccgccgctacgatccagcagcggcttcaaggatccaaaagctgtaccgggcaaaccgctccaaggccatgagggagatcctagacgggccctcgccctactgcacgatcccatctgagcgtctctacagctacttcaaggatgtattcgaccgcatagcccggaatgacgcgcagcgcccagagtgcctccgccccctgccccgtgtcgacgaagcaggtgtcctggaaactgactwtacgcccaaggaagtgatggccagactctcaaaaacaaaaaacacagctcctgggaaagacggcatcccctacagcctcctgaaaaagcgagatcccggctgcctggtcctcgccacgctcttcaaccagtgcaagcgattctgccggactcccagctcctggaagaaggccatgacggtactggtgtacaagaagggcgagcgggatgaccccagcaactggaggcccatctccctctgctccacgatgtacaagctctatgccagctgcctggcgtcgaggatcacggagtggtcggtgagcgggggagccatcagctccatccagaaaggcttcatgtcctgcgagggctgctacgaacacaacttcgtcctccaaaccaccatcgaaacggccagaagggcgcggaggcagtgcgcggtagcgtggctcgacctggctaacgcctttgggtccatgccccaccaccacatctttgccacgctccaggagtttgggatgccagagaacttccttcgtgtgatccgagaggtgtacgagggatgcagcaccaccattcgctcggtcgaaggggagaccgccgagatcccgatccggagcggagttaagcagggctgtcccctcagccccatcatctttaacctcgccatggagccgttgctgcgagcgatctccaatggcacagatggcttcaacctccacggtgagagggtgagcgtcctggcttacgcggatgacctggtcctgaccgcggatgacccagagagcctccaaggtatgctagatgccaccagtcgagctgccgactggatggggctccgcttcaatgcaaagaagtgcgcaactctccacatcgacggcagcaaaagggactcggtgcagacgacggggttccagatccagggcgagcccgtcatccccctggcagaggggcaggcgtaccagcacctcggcacgccgacgggtttccgtgtccggcagacacccgaggacaccatccaggagatcttgcaggatgccgccaagatcgacgcctccctgctagcaccgtggcagaagataaacgccctgaacaccttcctgatcccccgcatctcgttcgtcctaaggggatccgccgtggcgaaggtacccctcaacaaggcagacaagatcgtccggcagctggtgaagaagtggctgttccttccccagagagccagcaacgagctggtctacatcgcccacaggcatggcggtgccaacgtcccccgcatgggcgacctgtgtgacatcgcggtgatcacccacgccttccgcctgctgacgtgtcccgacgccatggtaaggaacatcgcggcaaacgccctccatgacgcgacaaagaagcggatcggcagagccccctccaaccaagacatcgccaccttcctgagcggttccctggatggcgaattcggacgggacgggcgcgacatcgcttcactgtggtcccgcgctcgcaacgccacgcgtcgcctggggaagcgcatcggctgccgctgggagtggtgcgaggagcgccaggagctgggagtcctggtgccgcagatcaggtccaacgacaacaccatcgtcaccccgagcgccaggggcatgctggagaggaccctgaaggcagccatccactcactgtacgtggaaaccctgaagcgtaaaccggaccagggtaaagccttcgaactgaccagcaagtgggacgccagccaaccacttcctcgccgggggcggcttcacccgtttcgccgactggcggttcatccaccgtgcccggctcaactgcgtcccgctcaacggagccgtccgccacgggaaccgagacaagcgttgcaggaagtgcggctactccaacgagaccctgccccacgtcctgtgcagctgcaagccccactccagagcctggcagctgcgccacaatgccatccagaaccgcctggtgaaagccatcgcaccgcgcctgggggaggtcgccgtgaactgcgccatccccggtactgacagccagttgcgacctgacgtggtagtcaccgacgaggcccagaaaaagatcatcctcgtcgacgtcacggtctcctttgagaacaggaccccggccttccgcgaagcccgagctcgtaagctggaaaaatacgcccccctggccgacaccctgagagcgaagggctacgaggtgcagatggatgccctgatcgtcggagccctgggcgcttgggacccctgcaatgagcgtgtgctgcggacctgtgggatcggtcgacgctacgcacggctcatgcggcgcctcatggtctcggacaccatccgatggtccagggacatctacatcgaacacatcaccggccaccgacagtaccaggaggtgtgagccggtacgacatcgtgcatcaactatgagaaagggactgagagactttttccattggaccatatgaactggaaccataaactcactgaacattaaatctcaccaaatgagggtaaatccatcctcatcatcgtatccactcattatactccacacctgaacatagccattatatgaacaacatacccccatatctcaatgtctgtactttgacccgttaaccttttacccccaatcggggatattgcagattatgtattccttacgccacccgatcctaaaccgaatttcgcaccccttgataatctgtaccttattccctgataaccagaaacttctatgcttaaactctgtaccgtttttttttatttcaacatcatcttaataaaattattaaa

SEQ ID NO: 1060 - DNA, 5122 bp, Chrysemys picta
  source 1..5122: mol_type = unassigned DNA
ttttttctgatgcttgactgcaaacacccatccagaagatggaatctcctgcagccatttttgaaaaaattgatgctgctttaaagatatactccattctcctwktttgkaagaaaactctttttcagcttcagctattctgtcatcggctgctgctgttcctgcttcccagaaagctcagcmaaaacctatcctgaagaccwcccttggtgcctcacggaagacccggascacctgcaagaaccaaaacattaggagctggctgaagaaaccccccgtggatacctcwgcagggagacctggstccagmaggacakctcttcgggacctcmcatcsaggagcaagaatatctcaacagctcttcaggagggggacccccggagaaccctgcccgcttcccagaaccaggatgctgatcgccgccccaccgggaaggatgccaccgcaggagcccccccaatgacccaggaccaggatgctgattgctgccccgccgggaaggatgccaccagaggagcccccccgatgacccaggaccaggatgctgatcgctgccccgctgctccagagagggatgctccggaaggaaccacctcctcaaccccagaccccaaaactacttaccacccggctgtccggaggagggccgctcgaaggggaatgcacctcagagcccaagatctcgatgccgcacgctgcccttccgggcaaagagacaacgtggccagtgagtccagcgcccccccaagagcgacttcacctccccaagcttctctaccagacccagaggaatcacctggcgagtctgcaggcacaacagagatccgccccacggagggtgaggcaggggaagaagaccgcatctacctccagtacccgctccctacaggtctcctcctctgccccttctgtctccccgtccatggagtccagaccctcgcggccctcagcaaacacgttcgtaagacctacaacaaacggattgctttccggtgtagccgctgcgatctccccttcgagacccaaaagaaatgtaagtttcatcaagccacgtgcaggggaccccccacgaccgcgaaagtgaatcccactgacatcctccgggttccaaccctgacccccaccgatgatctggcttcagcaccccagccagcatccccagagtcacagcagataaggggggaccaaccgccaactgagggaagcgtaacccccgcctcgaggactgacgatgccaccaaaaggaccagtcccgtctccagaatccccacgctggaccctgctgtgagggggaccaccgccacctctcaggtcaacaacctcaccagacgcctcagcgacctcataaaaaccatccggcacaacacggacacgagacgctgcagcgctcccccacaggtaacctcatgccgccctgccgtaggagcaactagcatcgtcccccaggctgcacggcgagatccagccaacggaggagcctcccgtagcccccagatcccacagccagaccccgcccccgggagacccaacacctcctccaaggttacccaaagagcctctgaccgccaaaaaccccatgccccaccgaggacccaccagccggatgccgcccgcagaagaaccagaaccatccccagcgcttccaaacacgaccgcgccccgacaaagcccagcaccggtgcttccagaaccccactccctcccggaagatccagtgctgcctcggagacaccgagagctgccctccccaccacaccaggacccccgcctcaagacccacctgaacaccgctccacagtccgagggacaacaaggccgcaaaccgtccccgcagcacctgaacctgcagagacaacgcagcaggaggagcgacggccacgagcgagggtcgccacgccgtggcaatccgcctggatggaggagctggcaaaggctgaggactttgagaacttcgacaccctgatggacagactgactgcagaactgtctgcggaaattacggccagaaggagggaaccccaggaagccgcacgggccactcgcagattccctgcgccgagccgtaacaacaccgccagagaaggcaggagaggggacgtcggccgccgctacgatccggcggctgcatcccgtattcagaaactatacaggatgaaccggacgaaagccatgagggagatcctcgacgggacctcctcctactgtgccatccagcccgagaggctctactcctacttcaaggatgtgtttgatcacgaggcccagaccaacttgcgacgcccagagtgcctttccccgctaccccggatcgacctcacggaggacttggagcgagatttttccccgcaggaggtgcaggcgaggctgtcgaggaccaaaaacaccgcccctggaaaagatggcatccgctaccccctgctgaagaagcgagaccccggctgcttggtgctcgctgccatcttcaacaaatgcaagcagttccatcgcgttccccgctcctggaaaaagtccatgaccgtgctcatccacaaaaaaggcgamcgagacgaccccggcaactggaggcccatctccctctgctccaccatctacaagctgtatgccagctgcctcgcggcaaggatcacagactggtcagtgtgcgggggcgccgtcagctcagtgcagaagggtttcatgtcctgcgagggatgctacgagcacaacttcctccttcagacggccatccaggaggccaggaggtccaagaggcagtgcgcagtagcatggcttgacctgaccaacgcctttgggtccataccccaccatcacatctttgccaccctgggagagttcgggatgccagaaaccttcatccagatcctccgggacctctacaaggactgcaccaccaccatccgcgccacggacggagagacggacgccatccccatccgccgcggcgtgaaacaaggatgcccccttagccccatcatcttcaacctggccatggaaccgctcatccgagccatctccagcggcccgaccggcttcgacctgcacggcaagaaactcagcattctggcctacgcggacgatctggtcctgaccgcggatgacccagagagcctccaaggtatgctagatgccaccagccgagctactgactggatggggctccgcttcaatgcgaagaagtgcgcaactctgcacattgacggcagcaaaagggactcggtgcagacaacggggttccagatccagggtgagcccgtcatccccctggcagaggggcaggcataccagcacctgggcacgccaacagggttccgtgtccggcagacacccgaggacaccatccaggagatcttgcaggacgccgccaagattgatgcctccctgctggcaccgtggcagaagataaacgccctgaacaccttcctgatcccacgcatctcgttcaccctaaggggatccgccgtggcgaaggtgcccctcaacaaggcagacaagatcatccggaagctggtgaagaagtggctgttccttccccagagagccagcaacgagctggtctacatcgcccacaggcacggcggcgccaacgtcccccgcatgggtgacctgtgcgacgtcgcggtgatcacccacgccttccgcctgctgacatgtcccgacgccacggtgaggaacattgcggcgaacgccctgcgtgatgcgacagagaagcggatcggcagagccccctcgaaccaagacatcgccaccttcctgagcggctccctggatggggaattcggacgggacgggcgcgacatcgcttcactgtggtcccgcactcgcaacgccacgcgtcgcctggggaagcgcatcggctgccgctgggagtggtgcgaggagcgccaggagctgggaatccgggtgccgcagatcaggtccgacgacaacaccatcgtcaccccgacggccaggggcttgctggagaggactctgaaggccgccatccgctcgctgtacgtggaaaccctgaagcgtaaaccggaccagggtaaagcctttgagttgaccagcaagtgggacgccagcaaccacttcctcgacgggggcggcttcacccgtttcgccgactggcggttcatccaccgtgcccggctcaactgcgtcccgctcaacggagccgtccgccacgggaaccgagacaagcgttgcaggaagtgcggctaccccaacgagaccctgccccacgtcctgtgcagctgcaaaccccactccagagcctggcagctgcgccacaacgccatccagaaccgcctggtgaaagccatcgcgccacgcctgggggagatctccgtgaactgcaccatcgccggtaccgacagccagctacgacctgacgtggtcgtcaccgacgaggcccagaaaaagatcatcctcgtcgacgtcacggtctcctttgagaacaggaccccggcatttcgcgaagcccgagctcgtaagctggaaaagtacgcccccctggctgacaccctgagagcgaagggctatgaggtgcagatggacgccctgattgtcggagccctgggcgcctgggacccctgcaacgagcgtgtgctgcggacctgcgggatcggtcgacgctacgcacgtctcatgcggcgcctcatggtctcagacgccatccgatggtccagggacatctacatcgagcacatcaccggccaccgacagtaccaggaggcgtgagccagagtgacatcgttctcccactacgagaaagggaccaagtgaccttctccgttggatcatatgaactggaaccataaactccctgaacattaaatctcaccaaatgagggtcaatccatcctcatcatcatatccactcattatamtccacacccgaacacagccactctatgaacttcataccctcatatctcaatgtctgtactttgacccatcaaccttttacccccaatcggggatattgcagattatgtattcctcatgccacctgatcttaaaccaaactttgcaccctcgataatctgtatgttattccctgataaccagaaacttctatgctcaaactctgttcactattttttttaacatcatcttaataaaatttttaaatctgtt

SEQ ID NO: 1061 - DNA, 3851 bp, Drosophila yakuba
  source 1..3851: mol_type = unassigned DNA
aaagtgtagttcttttctgttttagtgtagtgggaagtctgtttctttttattatgttttttacgaaaaagtcctggtctttgaaattcattgtctaaattttaaataaaattataaaatttaaaaagaaaattaattaaagaagcgatgaaatatctctgaaattcaatcaatcaattaatcatggcgtctcagcgagtgcacgtatttgcctaccccttcgtgggaccattccggtgctccgtatgcatggatgcgtccgggatgcatcccactaggtcgctgggcgaatacggcacatacgctgcggcatatcagcacataacccggcgccacccacaagtggttattacataccgttgccgggtctgtggcgctgatatgccccggggtatgaagcagctcaaagcccatgtggccgcgagccaccccgagaccaccacagacgcccacgggatgcttgtggaagcagccacagccccgaaccctgccttaccactccccgccttctccccgagacagtcagcgctgagccctgtgacgacgagagccagcgaacgcggtacgcctctccccacaagcaggcgcgtactctgcacgacgccgagccgcgcgatgcttcccgggaacatgccccatcctgcgctgagccccgttgtcacaggtgccagtggacgcactggaaggactgttgcccccattccaccaacacgacagatggccccgagggcaccgaccgctgcgcagacaccatcaccagccccgcaacggccgcctgcccgcaacgttccccctgcccccttgggtcaagtaacgggtgtgacgagacggctcctgagaagcggcaaccagccgccgatctcgtccataccgccccgttcgccgtcctcgtccgtgccggcccgttcgccgatctcgtccgcgccggcccgttcgccgaccaccaccaggacgacgaccccctcccgcaccggtctgggagtctcggccccctctgctccaagcagaaggacccccgaaagacccaccagcaccgccacagcgggcaggccgggaaccaaacccacacggacatacccagagccgcccccagcagaagggccgcaatctgcctgatggccaatgccgcggccaccagggaggacctgctgagggccgccaccagcctttccgaaatggcggccgcgaaccagcctacccgctcgcccactggaggtggcgagcccacctcacagggtaggcgcggaccgcaagcactggcagacgcagcgaaaaggatccaacaaatatacaggaccaacatacctcgcgccatgagaaaagtcctgagaacactgctcacggcagtgtttagcgcctgcctgaggacaggtcatgtccccgatctgtgtaaaaagtccagaacggtcttaatccacaagaaaggsgacagaactgacctgtcaaattggaggcctctttccatgggtgacaccatccccaaattgttcgcagccgtcatggcggacaggctgacggcgttcctcactaacggaggaaggctcagcgaggagcagaagggcttcctccagcacgaaggctgccatgaacacaattttgttcttggccaagtgctggaggagagcagacgccaaggcaaggacctcgtcatgggctggctggacctgtccaacgcgttcgggtcgattccgcatgccaccatcatggacgcggtcgccggtatggggatcccttcgaggatccggaccataatccaccagctggccaccggcgccgcgaccaccgccaaaaccattgatggcatgtcggaagagatcccgatcgaagcgggggtcagacagggctgcccagccagcccaatcctctttaacatcgcaatagagcgggtacttcgcaaaatcaaaaccgtcaacgcggggtacctgctctatgggagccgcattagcccgctggcgtacgccgatgacctggtgctaattgcgagctccccagaggagatgaggtccttgctgcgtgctgcggacgacgccgcaatagaagccggtctgcacttcaaccccaagaagtgcgcgaccctacacctcacggggaagaaatcctcgcggagggcagtgcagaccggcttcctcgtccgtggcacgccaataccggccatgacagagggggatgcctacgaatacctcggcatccccctgggtttaaaaaaaaaccaaacacccagggcagcgatggaagcgatagttggggacatagccaagatagatgactcgctgctcgccccgtggcaaaagatcgacgcggcccgcaccttcgtggcaccgaagcttgacttcgtgctacgaagtggcgccaccttgcgggccccgctgcgtcatctggatacagtcattaaaaaacacattaaaaaatggctgtatctgccgcagagggcgagcgcggaggtagtatacaccccgctgaagaaaggtggagcgggcatactaccttcatctatattggctgatgtcctaactatcgcccaggctcaccgcatggtgtcctgccctggggaggtcgtctcccggattgcaagtgagggcctgagagaagcggtaaagcgaaaaataaaccgggagccatccggcgacgagatggcccactttctctcaggctccactctatccggggagacagccagctttggcgacgccggattctggtcgagggtgaggatggccaccaaaaggcaagctgtgcatctgggggtgcgttgggcctggagaggaggtgagctactggtcgagagtagaggacaaagaaaccgaccagtggccaccgactcgaactccaggtcccaactcatccaacgtctcaggtgcgcagctcaggatgagttcctgaccatcctcataaataaacccgaccaggggaaggtggcgaagctctccacgctaaccccagtcagcaacgcgttcatacgcgacggtagctttaccaggtttgctgactggcggtttatccacagagcccgactgggagtcctcccactcaacggagcgatccgatggggcagcggcgacaagcgctgccgggtctgtggatatcagctggagagcgttccacacgtgttgtgccactgcatgcaccactcaaacgcaatgcagcagaggcacaacgcggtgatggatcgcctcgccaaggctggctcacggctggggacccccagggtgaactgccgcgtggaaggggtcgccgaggacatggcggccctcaggccggacctggtatggcgcgacgaacggagcagaaaaatcgtcatagttgacgtgactgttccgttcgagaacggggctgaagcgtttgataacgcgaggggcgagaaagaagaaaaataccgccccctagctgaagccctgcgcgccatgggataccaggtaaaactggaggcattcattgtcggagccttgggctcgtgggaccctaaaaacgaaagggtccttaagactttgggtgtctccaggttttatgctggcctgatgcgcagactgatggtggccgacaccatcaggtggtcccgggacatttatgtggagcatgtatccgggatcaggcagttcaccctgccaagtggagctccctccaactaaaaaattaaaatgccttaaaaataaataaatatatcaaaatttaaaaaaaaaaacgaggaacaaataaacacaaattctgaaagatttatataatttaaaawataaatcgaaaataaatgttgaaaacaaaaaaaaaataataataataataaaaacacaataacactcacccggcctgccccagaggcaggtaaacatttactggccatatggctttttttttaa

SEQ ID NO: 1062 - DNA, 4739 bp, Gavialis gangeticus
  source 1..4739: mol_type = unassigned DNA
  misc_difference 325: note = a, c, t, g, unknown or other
  misc_difference 444: note = a, c, t, g, unknown or other
  misc_difference 749: note = a, c, t, g, unknown or other
  misc_difference 785: note = a, c, t, g, unknown or other
  misc_difference 836: note = a, c, t, g, unknown or other
  misc_difference 1397: note = a, c, t, g, unknown or other
  misc_difference 1991: note = a, c, t, g, unknown or other
  misc_difference 2453: note = a, c, t, g, unknown or other
  misc_difference 3305: note = a, c, t, g, unknown or other
cgctggaaagacggagaaccgcttctttttcctgcgcccggcctggtattgcacttcctccaggaccagcgccaacctagtccggcagactgccggaataatagcctcagaaagagagctggctagcagccctcttttctttcctccggtgcagcgtgggttcttgtcagtcctgatgggctagggaaggcggtgccgccagtacgtccgaaagagcgccggttgcgcgagcgaccgcgccgctcaggcgagtagcccaagggtcttacggttcgccggacccgataacgcgaaagccccgactcgggccagtagccgaagaccntgggcctccctccccaggtcggagtaggcgaacgcccgtgctcggaggacggaacgtggacaaaacacccccaggtcccaatgacgccctgatccactgacaagaacgctcgaggcacnccaggagacccccagctagggcagaccgccgaccacgggtcgcggaggaccctcccaggagggtggaccagcgaacccgagtcggcgacgaaccccgacgcaccccccccgcgatgtcgggaccccgacaggcggcggcggacccccggccatcgaccgacccccggaggcagagagactctcagagcccggaaccccggctgacgagagccgcctcccggcggaggaccccggaccccgaggacgccccccggacgacggcggagcaccccgagcgacggcggactcctccggacccccgcggnccctcggcgacgacggcgggccccgagcggcgacgncccccggaccccggcggtcccgaggacgacccccccgagggcctccccacnctggtggaggagccccgaacccccccgacaccggacccccccgacggacgacccaggcgagggtgcagacgcggcagcgctcacgttcctccccttccccctccctgcgaagctgctgtgcccgacctgccacccgccaaggcagtacaggtcgcacaacgacatgaacaaacacctacggcgcttccaccagctgcgcctagcgttctactgctccctctgcggcaccgagtacgaggccctgaagctcctgaagaaccaccacaaggtatgccagggccccggggccgagaggagacccggcacgctggtgaggtccgccgccccacgacccgggccgcggcgcgaaggcccgccagaccggccgccccgccggcgaccccaccggaccagacctccggggaccgcccgacggagagacccgccccggcgacgccaccacgcaggtctgcacccagggacccccgaccggacgtgacgccccgaccggacggcccccctcccggacccccggggccgcccgacgcccccgacccgccgaggatcccggagccgcccggngagcccgagccgccgggagccctccagctcccgagcgtgccggggtctccgggtgcggagacctccgcacagcagaggatgcccaccccgcggcaagccctctggctggaggagctctcccgggccaccgccttcgaggccttcgaggcctcggtggcccggctcacggaggagctctcggcggccgcccggcccggccagccccggaggggcgccgacaacggaccgacgacgcgacgagaccacagaccgcagccgcagaggcgacccaggcgccagcgctacgacccggcggcagcctcccggatccagaagctgtaccgggccaaccgccccaaggcggcgagagagatcctggagggaccctcggctttctgccaggtcccccgggagactctgttcaactatttcagcagggtcttcaaccccccggcagaagccgccgccccacgccccgcgaccgtcgaagcgctgacccccgtccccccggcagaggggttcgaggaggccttcacgccgcgggaagtggaagcccgcctgaagaggaccagggacaccgcccccggcagggacggcatcaggtacggtctcctnaagaaacgtgacccgggctgcctcgttctttctgttctcttcaacaggtgcagagagttccggcgcacgcccgccgcctggaagagggccatgacggtcctcatccacaagaagggagacccgaccgacccgggcaactggagacccatcgccctgtgctccaccgtggccaagctgtacgccagctgcctggcggcccgcatcaccgactgggcggtgaccggcggggccgtcagccggagccagaagggcttcatgtcgacggagggctgctacgaacacaacttcaccctccagatggccctggacaacgcccggaggaccaggaagcagtgcgcggtggcgtggctggacatctccaacgccttcggctccgtgccccaccgccgcatcttcggcaccctccgcgagctgggcctaccggacggcgtcatcgacctggtgcgagagctctaccacggntgcaccacgaccgtccgcgccaccgacggagagaccgcggagatccccatccggtcgggggtgaggcagggctgccccctcagccccatcatcttcaacctggccatggaaccgctccttcgagccgtggcgggcggccccggcgggctcgacctgtacggccagaagttgagcgtcctggcctacgccgacgacctcgtcctcctcgcccccgacgccacccagctgcagcagatgctggacgtgacgtccgaggcggccaggtggatgggcctgcgcttcaacgtcgccaagtgcgcctccctgcacatcgacggcaggcagaagagccgcgtcctggactccaccctcacgatccagggccaggcgatgaggcacctgcgcgacggcgaggcctactgccacctggggacgcccaccggccaccgggccaagcagacgccggaggagaccatcaacgggatcgtgcaggacgcccacaagctggactcgtccctgctggccccctggcagaagatagacgcggcgaacaccttcctcatcccccgcgtcgcgttcgtcctgagaggctcggcggtccccaagacccccctcaagaaggcggacgccgagatccggcggctgctcaagaagtggctgcacctgccgctgagggccagcaacgaggtcctgcacatcccctaccggcagggaggcgccaacgtcccccgcatgggagacctctgcgacatcgcggtggtcacccacgccttccgcctcctgacctgcccggacgcgacggtaagtatcatcgccgccagcgccctcgaggagaccgcccgcaagaggatcgcgaggcagccgaccggacgngacttggccaccttcctcagcggctcgctggagggcgagttcggccgagacggcggggactttgcctcgctgtggagccgagcccgcaacgccacgcgccgcctcgggaagcgcatcggctgcgcctggacctggaccgaggagtgccgggagctgggagtctccctgcaaccagccccgcacgccgaccgcgtcaccgtgacgccccgcacgaggaccttcctggagaggttcctgaaggacgccgtccgaaacaagtacgccggcgacctgagggccaaacccgaccagggcaaggtcttcgacgtcacctcgaagtgggacgctagcaaccacttcatgcccagcgggagcttcacgcgcttcgcggactggcgcttcctccaccgcgcccgcctcaactgcctgcctctgaacggggccgtgcgcttcggccaccgggacaagaggtgccgacggtgcggctacgcggcagagaccctcccccacgtgctgtgcagctgcaagccgcacgccagagcctggcagctccgccacaacgctgtccaggaccgcctggtgagggccatcccggccgcggcgggggagatctccgtgaaccgcaccgtcccgggctgcgagagccagatgcgacccgacatagtcatcaccaacgaagaggccaagaaggtcgtgatcgtggacgtcaccatccccttcgagaaccggcgccaagccttcaccgacgcccgggctcgcaagcgggagaagtacgccccgctggccgacaccctgaggggccgcggctacgacgtgacggtcgacgcgctcatcgtgggaacgctcggagcctgggaccccagcaacgagagcgtcctgcgtgcctgccgcgtctcccgccgctacgccaagctgatgcgctgcctcatggtgtccgacaccatccgttggtcccgcgacatctacgtggaacacatcacgggccaccgccagtactccgaccccaccagacgagccgccgccggaccggacccggaggggaccgcctgaaccgccccccctccgcgccagacggaccttcacttcactccgagaggattcttcgaccacggacgaccccgctccacccgaagaggacccccgcgatgagactctatacggactgaggcacttccttcgaaccacttcctccaccattgcggaccattgtaacgggtttgtgtgtatctatctcctttctctctcagcgtcgcgaaccccctcccccaccccccacccccgggcttagttggctaacattgtatctcctgtaacctagtcgcgttcccctcctcacccccatccctctattgttagtccctcgctcgggcgatctgtatttccctatcggctttgtcatcttttttctggattcccgatcctaaacatttactaataaaagtcaatctgttcttt

SEQ ID NO: 1063 - DNA, 4030 bp, Lytechinus variegatus
  source 1..4030: mol_type = unassigned DNA
atctactatcatgtcttgtccaagagagggaagcgatcacctcggtcctgatcctgagacacccgccctccatcagggttctgacatccgggttaccagttctcgccttcgaggttcccgcggaaagagttctcgccaaccaagctcccgacaccaagttcctgccagcgaggcttccgccaccgcccagcagactgccgccaacgagtgccaggtgtgtggatcttccttcgccacctccagtggactccgccgccacatggccaggcttcatcgagctgcctctgcggatcctgagggtgctgcgccggcttccatcacagagattttcgactaccccttgccttcccggtggaaatgctcggcatgctcggagaactttttcaaccagcagaccctcaagcgacaccagaccaggcatcatccagctaccaccttcgcgtatgcctttcggtgttcgtcatgccggtccgagttcgactcagcacggagggctgcgaaccattggcaggtccacaagaaggagcgatctcaactctctggcaccgagccccaggcctcttcccaagccagagttagcatggctcattctcctccacctctgcccaacacttcttgggcggagctcgcctcgaatcctgccgagataccttccttcgtctgggagtctcctcccaagaaccgcccctcggttgaggagttcggttcgtctctgccaactgatgttacgatgatgtctcaaagtcctccaccgcaggtacagtcgtctcctgtccctgctctgactcctctttcacccgctgccactgcctccagttctcctccaggggctgcaaggcagctgacccctcctacacagactaacaccccagtcacccagagggctcgcctgcaacctgaagcagacgtcgtacctgaactccctccttcagtcaccgagcaccctgtgtctgacgctcaacactgggttgatgctgtatcctctgcatcagattggtctgagtttgaagcagtatgtgatcaatttgtcatccacgctgttgctgtttcccgtcccaatcttgctcgaccccagcagcaagataggcagagatctggtgaccaccctcctagacagcaaagaggtcagcatcgaccaaccttcgatgtccgtgaggcaagtagaatccagaagctctatcgtaccagcaagaaaagagccatcagacacatactgaaagagaaatcaccttccttctctggttccgagtcagacgtcttagacttcttccgcgaggtgtattctgctaaagaagttgacgaggaagcagttggtaaactagcatcctcgctcttcgatgtccctcaaggtgatgactctgcgacatctctgtctctgcccacgtcagcgaaggagatcggagcaaggctgtcaaggatgacaaactctgcccccgggaaggatcgcttggagtacagacacattcgacgtgcggacgggtccttcagcatctctgaggccatctttaacaaatgcctggctgaaggtcggatcccagctccttggaagacagcatctaccatcctacttcacaaggctggccccacggatgatcccgccaacttccgcccaatcgccttacagtcatgtctctacaagctttttatggctgtacttgcggaccggctgaccaagtgggcctgtgagaaccagtacctcagccccgagcagaagtccgctcgcccctgcgaggggtgcttcgagcactccttccttctctcagctgccctgaaggactgcaggagaaaccagaagaccatctgcatcggttggttggaccttaggaatgcatttggaagcattcctcatcctgtcatcaagatcgtcctgtccagtctgggtgtccctgattcgcttgttaccctcctcatggatgcctacaatggtgcgtcaacctcgttcacgctgaccgggggccagaccgacaccgtacccatcagatcaggggtgaagcaaggctgcccgatgtccccaatcctcttcaacctggccatcgaacttatcatcagggcagtcaagaagaatgcatcagacaaccatctcggagtgactgtccagggcaagaacctctccatcctggcctatgctgatgacctagtgctgctcagccgagacactgaaggcctccaatccctccttcaagttgctggctcttctgcatctacccttcagatgcagtttaagccccagaagtgtgcaacactcacccttgactgcaagcgtggtaccaatgttaggcagtctgctcaccatatccaaggggctgccatcccatcgcttactgaagaggagcgttaccgctaccttggggtccccattggactcccaaggctcacaagtctacaggagagctctaggaagctgtcgtcagacatcgagaccatttcatcctcccttctagcgccttggcagaaactggatgcaatcaagacctttgtgatacccatccttcagtataccttgcgggccacagaatacctcaagtccgacttgaaacccctacgagcagccattatcaagcacgtgaagaagatctgccatcttccggtaagatcatccaacgccttcgtcttcgcgtcccgaccctccggtggtttggcttttgttgacccaggagtggatgccgacatccttgtcgtaacccaagccgtccgtaccctggcatcggatgatgacacggtgagagccgttgctctaggacagctgacctcagtggtccacaggacggtccattctgcaccatcagatgactgcatcgacaagttcttgtccggaagcagtgagggccctctggcaaactcagggaacagtggccaggcatcatctctttggtcacgtacaagggctgcatcccgtcgcctgaagataaggatcgtcggagcctcgagcggcgacatcaaggtcgagagtggaggccgtgccatcccctccaagaaagtgactgcaggtctccgctccgaccatcacaacgagatgtcagagaagctgcggtcccttccagaccagggcaaggtagccagggcactctccttggatagtttcgccaacgcaacatcatggctgacatccgggagtttcatccgattttgcgactggaggttcatccaccgtgctcgcctaaactgtctacctaccaacgctgctgtccggcggtggaaacagaacgccaacaccaagtgccgaaggtgtgatcaccagttggagacgttgccccacattattaacaactgccgtcccaacatggtaccgatccgccggaggcacaactccatccaagaacgcctggtgaaggcgattcactacggtgacatctaccaggaccagcatgtccccggcgacccgaacccaagggagcgacccgacatcacagtggttgagggtaacaaggtgaccattgtcgacatcaccatcccattcgacaatggtccggatgccctctccacggctgccaacgccaaagtcatgaaatatgacacactgcgacaagagctggccagccgtggtatggatgtcgaggtccacgcttttgtaatcggctcccttgggtcgtggcacggggacaacgagcgtgttctgggacgtctaggtatctctcgccgatacagaacactgatgaggcgcctgtgctgcatagatgcgatcaaaggcagccgggatatctatatcgaacatgttaccggtcaccggcagtattgaatagcatttatattgtgttccaaacaacatactcattattatatctaaacatttttttttctgttcctgacaatctacgtaaagtctgctaaccaactggcatgatgaaataagataaaatccccttacacattaatttcttgtcacatcataatgctttgtcaaagcaatgtcctacataatatctcgatgtcaccccaattaattttacatccttcggtaacctttataccgttggatcaacatatatgatttgtaaaactgttatttctgagttttttctatgctaataaa

SEQ ID NO: 1064 - DNA, 3968 bp, Nasonia vitripennis
  source 1..3968: mol_type = unassigned DNA
  misc_difference 805: note = a, c, t, g, unknown or other
  misc_difference 914: note = a, c, t, g, unknown or other
  misc_difference 1216: note = a, c, t, g, unknown or other
ccattccttcgtacgggttttcgtgccggcatagccgggtgggagactcgcgcgggggaggtcatatctcaccaccatcctcgagctttttgctgcacctgatccgggmtaactggccgagaagttaaatgtattactgttaatgtactcatggagcaacaaccacacaccaaagcgatccgggagggggacttcatcgtgatactcctcccgcaaagtgacgacgagacactttgctgtccactctgcgtgggacgcggacggtactccggcaagacgcgggttgagtgtctcaatagacatgtcaaagaggtgcacccagacctaaccaccacctttaggtgctgggggtgcgggttcgcggctcccggggataagaaatatccccggaagatcgtgacccagcactgcgccacctgcgtccccgaggtttcgtccgcgccctcgggcagagtggacggagagaggagagttaacacccgccgtcggttgggtattgccgcggcaaccgaggccagtcccgtgagacgtactcgtcgtaacggcctggcctcacctccagtcgagcagaacatcagccaaagcgcggctcctccggaacccgcaagggtgccacaacatccggagatagttgcgctgggagagtcagcggatgacgaagtatttcgatctccggtgaactctcccccaagagactggagggctgcggcgccccaacaggcggcttcctcctctcctcsggcggtgcccggtatcactgctgcaaccccgtccaacaccaccaggacagggaatggctcggcanactccatcctagccgagcacccgatacctgcacctccgccaaccaacaccacggaggcgaatggtcgtgccgacataccccgttctgggcgggctccgccgcccggtcnacaagccgcccgtagaagggctcccacgacagaacaacgtcgcattgtgggactcctcgaggcggccactggtcgggagcagcttgaggaggcaacgactcaagctatgctattcctggccagattgaccgggcggcggcctgaaccccggaacgccattcggccgggamcgcggcaacgtcatccagctcagggggatgtccaagcgcaggcgcctgatcggattcasgaggccaagaaactccagcgtctctaccgaacatccaagaagcgggcagtmcagaagattttggcaggtcctnatatgaactgccaaatcgacaagaataccatcacagcccactttgtggagctggctgcccgcagagacggtggagaggattggcccgatgtcttcgatcgggaagagcccacggcggcgagcggcgaggccctttgtacccctatcacaagggaggaagtgtttcgacggctcaaggggaggaacaacacctcacctgggccggacggaatcacctacagggacctcgccaaggccsatccaggggcccatgtgctcgccgccctctataacascatctggcgcattgaggcgacgcctgccttgtggggggtgtccaacacmaccctkatatacaagaaaggcgacgccatggacatctccaactggagaccgatctccttgggagatacggtccccaagctatttgccgcgatcctggccgatagaatcaaaaggtgggccgtggccaacgggcgctacagtgcctcccagaagggcttcttggagttcgagggatgctatgaacataacttcgtgctccaggaggccattcgggaggcaaaaggcgggagaaaggagttggtggtggcctggctggacttagccagtgcctttacatccgtgccccactcctctatcctgcaggcgctcgagggacatggcctaccaagcaaagcgagaaacattatctcctcgctctacacaggcatgaccacccgcttccacacggcggagggacccaccgaccctattctcatccagtcgggggtcagacagggttgcccattaagccccgacgtgttcaaccttaccctggaagttgtcctacgggaaatacaacggacgggggagggctacacgatcgagggcaggcgtatttcccatctcgcctacgccgatgatgtcgcgatcctggctgactccccggctggaatgaggaggctgctttttgcagcagaacggggagctcgggcggtcggcctcaccttcaacccagcgaagtgcgctacactgcacatagcgggacgaggkgaggaggcagttagaccgactgagttctccgttcaagggacacctgtccgtgcccttgcttccggggaggcctacgaacatcttggcatccccacaggctaccaagtcaggcagaccccaatcaacaccttgcgggatctccttgctgacatcggctccatcgaccggtccttactggcgscctggcagaagctggatgcagtgggaaccttcctactgccccggcttgatttcaccatgcagggcgcccatatcgacaagggcttcttgaccgaggcggacaagatcatcaaaaaagctgcaaaatcttggctaagccttcctcagcgagcgagcgcggagctcgtgtttctacctccctcgcaagggggagggggtttgctcacggtcgctcacagctataaaatgctgtactcgagcgatgtcaccgtgagcaccatagcgggatccacactgaggaggaccgtttcggagaggcttaaaaagcgggcgtctaacatcgatatcgcccgcttcctctccggagatcttgatctgccccggtcgacgagcccgtcgacattctggaccaaggttcggagcgcggccctgagaattaagaccaaactcgggctgcgctggagctggtgtcaggggggggaagtactcctgatggcctgtggggatccacgtgcccccggaacaagagtctcgccgcagacaaaacatcttgtcaccacgagtctgcggcgctgcctgaatcggcactatgcggagagtctccttgccaaaaaagatcaaggcaaggtctttgaggttacccggaggagcggacaatccaaccacttcctccggagtggcagcttcactcgcttctgcgactggcgctttatccaccgcgcccgtctcgacgttctccccctcaatgctgccaaacggtggcaacgagggatggacaagagatgtcgcagatgcgggtcagacctggagactctcccgcatgtgctgagtcactgcggcccgcactcggcggcgagacaaaagaggcacaacaacatccaggacaggttggtgaaggcagcctcgagatgtccggggaccattagtgtcaaccagaccgttgtgggcgtccgcggccccgacgcggcattaagacckgacattgtcgttcgcgacgatgtcaaccgccgcgtcaccatcgtcgatgtggccgtgccgttcgaaaaccgcctcgaggcgttcgacggcgttcgkgaggccaagattgccaaatatacacctttggccaggcaactcacggacagcggttacaccgtaacggtggaggcctttgtagtgggcgccctcggcgcgtgggacccgcgaaatgaacgggtcctgagcctcctcagcattagtcgttattatgcgatactgatgaggaggctcatggttagtgacacaattcgctggtcccgggacatctacgtggaacatgtgtcgggcattcggcagtaccgggaatagtggggccataacacctaggccccacagtgtggcgatgtccatgtgtgtcgtccttacttatttatttatttgtcctgtcgagctgtttaatctattcatatgtatgtgttgtgtgtgtcgtccctcgtagcagttttattccgtccaaccagaggtcgaccaatattaaaataagcatggcttgaagcaggccaagcgccgtgttctaaccccgttttaggggaagttacttaacctaaaaatacaacttttcc

SEQ ID NO: 1065 - DNA, 5717 bp, Phytophthora capsici
  source 1..5717: mol_type = unassigned DNA
  misc_difference 169: note = a, c, t, g, unknown or other
  misc_difference 956: note = a, c, t, g, unknown or other
gcccgccggtggagtagccatgttggccaccaccgcccaagtctccgccgcagctgcgactgctgctgctcatcgagtcgcagtagtcgcagctgcacaagcaccacctcctgccggacgcgccgccgtggagcaccacgcgcgcgctgagccgtaccaagaccaaggnttccaggctcgcgcgcgcgtggmgctcccagccagcgacgcgttcagcagcagggtcggctgcggcagctcgacgctgcacggggacggcagcgacggcaggcaccaagaccacgacgaccaagccgtcgctgccgtccccatggacgtcgaccaaggtgctcggtggccgacagcggatcamcacccgctgtcgccgccaccggagctccgagtcggcggcaagcgccgccgcctgaacgacggcgacgacgaagacatccgcgagctggccgagcttctgctgcccgacgaggaggaggccgacgaccacaaaccagcgcccaggttacccgcgaccagcgctcatccggcctccgtcctcgctgtgtacgcgcacaacgcgcagcgcttcaactgcacgttgtgcgtgtacacggctgccagcttcgctgctcttacgcgacacagggactctcggcaccggcgcgtgaccttcctggacaggttctcggcgggttgcgcgtgcggcaaaccttttgcctcgaggctggccgcagcaagacacgcacaaacgtgcgccagcctcagcaccacactggtcgcggtttcgacgacaggaggagcatcaagccacactgtcgtcggagccaacaccaccgtcgccacggcggtcaccgccgaaccccccctgctccaccatcaagcctcggaactcactgtgcccccccccacgtgtgagttcccccgacgtcgatgtgcagctgcacagtccgccacaggaagatcagcacgaggacgccacccancacccggagagcacgcaacaccaacctcctgaggcaacccgctggggttcgccgctcgcgcccacgctcgttgcctccaggattgctcagcgactcggcgagctggaacctccacgctggggcccaccattaccccgcgcgatggttgtttcgcgaattacagcacggcttgaagctacacctgctcctcgatgggatccgccactcccacgccgcgtcatcgcctcccgcattgccgaccggcttgtacctgcgacggcaccgtgtcgctcggccctgaacgctgcattcccttctccatcgcgagacacggtgacggaatcgttcacccaggaggacaggcaactggaacccctgacgcggcacgtggacgaagagacgaaggacagcgagctgccgggcagggcgccgactgtactcgacgaggagtccaaggacaatgacgccactgccggtgagtggctcctccggttcgacggagcttgtcgagcgaacccaggcccaggcggagcaggtgccgtgctattcaaccctagcggtgcagcgtcatggacctgctcgcactttatgccgggcgccacggagacaaacaacaccgccgagtacacggcattcctcctaggcgccagagctgctgcagatcacggtgcgacgctacttcgcgtccagggggacagccagctcgtactcaggcaggtcaagggcatttacggtgcgaagagcacccgtctacggagactacgcgacgctgttcgtgccgaactggctcgggtggggcaattctccctccaccacatcgacaggcaggacaatgcgcacgcagaccgccttgcgaacagagcgctcgacatgaagagcacactagtggaatgcgcaacgcaccccggccggaacgcctgcaccacgacactgaccaccagtgctgccgctgaatcaccggcatcacccccgccggtgggagctcgagacacgccgatggccgatgccggcgaagagcgcctcgcagacgttgacgatggtgaagtttacgcggcgatgcggcttggcccaggcgaagttcctgaacgacggccacgactccgcctccgccagctgagcgacgaggaactggaagcagcgagcgagatggtggagcgactgggcgccgccttatcggccaagatcacagacgcggaagactgggcgagtgcggagggctacatcacggccctaccgtacatgctgtacgacaagcttcagtcgtactcacaggcaccgcgtggaccccaacaaccggtcttgacccggtccccgcgcggcgacgatcgcccagcttcctcggagcccaacgcatcatccacgactggaggggtggcatcggagcaccaaccgcggcgccgccgacgacgaggacgacgcaagggccgacgacagcgccgcaacccgcgccgatcgggacgcgagggagctacaggtgggcatcaacaacacaagaaacacaaaccacgcccaccccgcgagacgcagcatcatcgggaacaccgtctcgacgaggctctcgatgagctccacgccctcgagcgtaccgatcctcacaaccggccagcaattgccaaggcccgccgccgcgtcggtcgcatccggtctgccatcaaccagcagctactccgccacaagttcgacacggacgagaaggcctgtgtcgacggcatcctgtctacagcccgcgccgaacgcgctgcacgagcagcaacgccgtcgccaccagcatcaggagcgcccaccacgacagtctcggcgcccggtgccatcgtgaccaacgatgatggcacgtgccccatcccgagtgacaagctttggcgacacttcgacgccgtgaacacaccgcgccttgacttcgatgcggaggcacccgggagtgcggccttccgagcggcgatggaccacctgcccgcggcgacacggttgctggacctgctcaaagaggcgccgagcacggacgagatcgagacgcaactccagcacgtgaaggcctcctccagccccggcctcgacggcgtcggctacgacgtgtacaagcgcttcacgatacagttgctgcctgtgctgcgggcggcgttccggtgctgctggctgtataagaaggttcctcagagctggaagctcggcgtggtgcgcttgctgcacaagaagggcccgcgtgaggaccctgcgaactggagacccatctgtctccagcaagccatctacaaactatacacgggcatcctcgcgcggcgactaacccggtggatggacgcgaatgaccgccacgcacccggtcagaagggattccgagcggtgaacggctgcggggaacacaacttcctcgcagctacgctcatcgacaacgcccgccgcaagcatcggccactgtacgaagtctggtacgacttccgtaacgcgttcggcagcgtgccgttcgcgttgctgtgggattcgctacagcgcctcggtgtcccgcccgactacgtggacatgtgcaagggactctacaaccaagcctcgttcgtcgtcgggaacgcagtggatggcagcacagcgccggtagagcagcgcgtcggcgtttttcaaggctgtccgctcagcccccagctctttaacgccgccatcagcccactgctctatgcgctgcgccggctaccagataccggcgtgcagctctccagtgttgaccgccctggtgcctcagcgtacgccgacgaccttaagattttcagcggcaccaaggcgggcatcacgcagcaacacgagctggtggcgacgttcctgcggtggaccgggatgcaggccaaccctgccaagtgcaggtccatgggcgtgcggcgcaacaccaacggmgccgtcgaggcagacaacgtccacctcgagctcgacgatacgccgatcccctccatgacacacatgcaatcctacacgtacctggggatcggcgacggcttcgatcacgtgcgccgccgcgtcgagctcgctcccaagctgaagactctcaagcacgacgtgacggcgctcgtggagtccggccttgcgccatggcaggtggtgaaggccgtgaaggtgtacctctaccctcgggtagagtacgccctccggcacctccgacccgatgatcagcacctggagagcttcgacctccaccttcgccgcggcctccgccacctgcttcgccttcccaagaacgccacgaacgaattcttctacgcgccggtgtcgcgcggtggtttggggctgctgccgctggtggaactgcacgcagcactgcaaatcgcgcacggatggcagacgctccactcacccgacccagccatccgtcgcgtcgcgcgcgagcagctctaccagattgccgacgcgcggcaccggctcgacaaggaccactggccacaccggagagaggaactttgcgagctcctcctcaacggggagctcgggacgtcggcccacgcaccgcccaagcgacgcaacggtgacatcggctctctgtgggtcgacgtccgcaagaacctcaagacgtttggactgaaggtggccacagcgccggccaaccaggagaccggtgtaccagcccagccgctgcagctccgcgtgcctcaccacgccgagtggctggaccacggcaacgtgctgaggcacgtgaagctacacatcaagaacctccactggcaaacctggtgcgccctaagtgaccaagggaagaccgcacgggtgcacggcggtgttggcagcgcattcctgacccgacctcgcggcatgtgggaaagcgactaccgcttcgcggtggccgctcgcctcaacgtggtcgacaccgtcaacacactgtcgcgccggcgactccgcgcccacgaccggtgtcggtacccggcctgcaggtggaaggagactctggcacacgtcctcaaccactgcccgggtaccatggacgcggtacgtggccggcacgatgacgcgctcaaggaaatcgaacacacgctccgcgcgtcgtcgggcgaccgccgcgagctgcgtgttaaccaaacggtgcctggcctgcccgggccacccctgcgccccgacatccaggtctacaaccatgacaaacgcacggtcgcagttgtagacctggctgtggcgttcgatgagcagccgagtgaggacccagagagctcggggttggccaaggcagtccagatcaagaaagccaagtacgcgggcatcaaggagcatctcgagaaccaggggtggaaggttcatctctcggccatcgtgtacggctcgcttggctcggtggcggccagcaaccacaaggtgtacactgaacaccttgggttgctcaagcgcgatgcaaagcggctggaccggcagctctcgtcggcatgcatccagtccagccgccgcatctggaatttccactgcgccaagcaccgagcacgccagcacgagcaccaagcaccaccaagccaagcgacacggggcaggagggtgacggaaaccggggggaatccgtcgcgcaccgaccgccgctagacggcacagttctggcccacgtaggccgaaagggccccacccatgtagggaaccgccctcgggaaatccattccggtgttcgactgaagagatgctccttcgccttgacggaggtacatctcgacagtcgaacttcaactcgcaacatatccgatacagttacaaaccacagttagatatcagataggaaccttcctttaggaagctaacgggtacactggatggtaaatacacatacatttc

SEQ ID NO: 1066 - DNA, 6438 bp, Phytophthora infestans
  source 1..6438: mol_type = unassigned DNA
agctcggcctcgcggctgccttcccaggcgccgccgacttcgcgctctggcgcggcccacacgccgccgccgagcctccaagcgcgcccgttggctttcgcagacgcagggctcgcggcgacggccctcgccagcccccaagaccccccctacgatgtggcaccacccggcagggcggccggcaggctgcccgactcggtatcgccgggtgctacactctcagccgccacagctcgggccttggcggtccgccattggcccttggagctcgacagcgacagcagcgacgacgaggacgctcaagacccccacgccgccgccccagaacccccagaagacgtcgcgagtgtgcttgccccacccggcagggcaggcagcatgctcgccgacccagcagcgctggcagccggtctggctcgcgctccgccgcccccatcggcaccccaggacccaagccccgccttccctgctggccccgccggccagaaccctcgcgccgccgccccagcccgtgttgaagtccacacagtcgtggcaccacccggcagggcgggcggcatgctgcccgacccggggttggttgaagaacctatccaagcgacgtacgcgcacgacgctgcccagttcgagtgtgcgttgtgcccgtacgtcgctgagagcatggcagtgctcgttcagcaccgacggtcggctcaccgcggcacccgcttcaaggacatcttcaccagcgggtgccagtgcagcctagtgttttacgcgcgcattgttgccgccagccatgcagtggcctgtgccaggcgcaaccagcgagccgtgccaccagctccgacccctgttgcccccacgcggcccgaggctaccccacaacctactgggtacctcgccgcggcgatgactgccgctgcggcagccgcatcaagcgacaccgtagtggcagccgccaccaacatgcagagcgccgtgccagccgccgccaagaccactgggcttcagctcgtcccccccgagctggagcctgcccttccgcagcgtgcttcttgccatgcaggcaaacgccgtcggctcaatgccgacgaggcggtgacaccgtgtacgcctacggcgcgggtgtcgccgcaaacagaagtggcgatggcgcctcacgacgcaccccaggacgacaccgtcttacagcgtgaggccgccgagccacagccagacccagcagcaacgccgggtgcccaagtgcagcgagtcgaagacacaactgcggcgcaggatgacactgtgcagcaggaccacgacgccgacactgcccaggtctcgccgccccggcgcacacccacacgctggggaccaagaccaagctcaactcaagagcctagccccatgacaggcgagccggctgccaccctggcagcgcgaagaccactgactcctgccgcaacgggcactcgtgccacgcggtgggggccatgtcaccgcgcgatcggggccgcagccatcgcacgacttgtcacgggcctttcaacggagccagcgcagcctcagcgacggcagccaccgccaccacaagaacctccatcgcaaccagagccgctagcagcagcagcaacagccgcagcagacatagcagcaacagttgcagcagacattgcggcagcggcagcgaacgcagcaatggacgtggatggtggaccggcagccgacgagacatggctgttgcgctttgacggcgcatgccgacggaacccaggacctggtggagcaggtgccgcactctttgcgcccagcggtgccgtggtgtggacgtgctcgcactacatgccaagccgctccgaaacgaacaacaccgccgagtacacggcgttactgctcggcgtacagagcgcagtccaccacggtgcctcgcacctggaagtcgagggcgacagcagcctggtaatcgctcaggtaaagggcaccttcgcatgcaggaatgcgcggctccgccaactccgcaaccgagtgcgtcacgcgctccgctccgtggacacgcacaaactccggcacatcgaccgccaggccaacgcgcatgcagatcgccttgccaaccgcgcgctagaccagcggaggaccagcagcgagtgcgggacgcatggctcgtgcatggactcctgcctcgccgtacccacggccctggcggcgcaagaaacgccaccggcagcaccacccagcaccagtgccactccagccgaaggtaatgccatggacgacatcgcagccgagattgctgcgcgtgacgagggcgagaccttcccagtcctgccaattggcccaggctcagccccagaacggcaaccccgactccgtctgcgccaacttagcgatgaagagcgcgacgcagcggcagatgccctgcaggagctcgccgataccatggcgagtaagatcgaggatgctgacagctggacctccggcgaaggatacatcagctccatccccgagcgtatccgagaggtactgcagccatacgctacggccccgccgcagccgggacgctctcgccggcaacaacgccgtcgaccaccacgggtgacgcgcaaccagcgcgaacatcgactcgacgaagctttggacgacatggcagccacacagcaagcgaccccgcgagaccagcgggctgtgcgccgtgcgcggcgacgtgtgggccgggtgcgagcctcaatggcacaacaggagctgcgccacgagtttgccaaggacgagtctaagtgtgtggccaagatcctgaagacagcgtcgacagagacggcagcggaggacgagcacccggagacgtgccccattgatgcagctacgctccacgcccatttcacgggagtcaacgcgccaaggacggacttcgactacgatgccaccagcggccgggagtttcgagcggcgatgagcgaccttccgccagccaccgtggagattgatgcgttcgacgcggagctgacgatcgacgaggtggaggaccagctcacacgcgcggccaagacctcaagccccggccacgacggcatcgactacggcatctacagccgcttcgccgcgcagctcgttccgctcctccacgcggtgttccagttttgctggagacaccgtcgtgtgccaagactgtggaaggtgggcatcgtacgcctcatccacaagaagggcgacccaaggcagccgactaactggaggccgatctgccttcagcccacgatctacaagctctacagcgggctgctggcgcatcggctctcacgctggctggaaggtaacgaccgcctgccgatggcccagaaggggttcagggccttcaacgggtgccacgagcacaatttcatggctaccacgttgctggaccagacccgccggcagcaccgaaagctgtaccaagtgtggtacgaccttcgcaacgccttcggctcgcttcctcagcagctcatgtggcgcgtgcttcgccaccttggcgtcgactcaggcttcatcgaccgctgcagggatatctacagggactcggccttcgtggtggcgaacgcggcggacggtgcgacggacccggtgcgccaagaggtgggcgtataccaaggctgcccactcagcccgctcctgttcgtcgcggcgctggtgcctctcgtgcgccgtctcgagaaactcgacggcgttggtgtgccactggcggacggtgtgcggccctgcaccacggcctacgccgatgacctcaaggtgttcagcgacagcgccgccggcatccgcaagtgccacgacacagtggctggcttcctcgcgtggacagggctgcgcgctaaccctggcaagtgtgccagcctcgcagtgacgacgaacgcccggggcaacccgactagagacagcagcatgcgtctcgaggtccacgacgccgccatcaccacgctcagcctccacgaaagctaccgctacctgggcgtgggtgatggatatgaccacgtgcgccatcgtctccagctcgagccaaaactcaagcagctcaagcgggaggcggtggcgctgctgacgtcgggtttggcaccgtggcaggtggtgcgcgcgctcaaggtgtacgtctaccccaaggtggagtacgcgctgcgccacctgcgcccgctgcagtcgcaactgcaggcgttcgaccgtgtcgtctccaagggcttgcgacacctgctgagcctgcctcgctcagccaccagcgaggtgctgtacgccccgacgtccagcggaggcctgggcctgcagccgctcgtggagctgcaccgcgccctacagctcgcccacgcgtggcagatgctgcattccaaggacccagccatccaagcagtggcaagagcgcaggcttgccaggtggtgcgcaagcgctaccgcctgcaagaagaccattggcgcgggcgcgatgacgagctcgtgcgcagcttcctgaactccgagctcgccgcctcgccacacgctgaggtcctccgtcgcaacggtgacattgcctcgctgtggtccgacgtgcagcggtggctgcgcatctaccacctgcggttcgagcactgcgacgagacagaggcccatggcccgctcagcttccgcgtgccgcaccacaacaagtggcttacgcacaagactgtgctgcggcacgtgaagctacacctgaagatccgacaccagacccgatggaagggcatggtggaccagggcaagacggtgcgcgtgcacggtggggtgggcgccaagttcatgacgaccggagcgggcctgtcggacgacgactaccgcttcggggtgaagggccgcctcaaccaagtcgacacgaactcggtgctcaagcgcaaacgactgcgggcacacacgacctgcagggacccaacctgctcctcggctgagacgctggcacatgtactcaaccactgcgagtccaacatggacgccattcgccagcgtcacgacgacgccctggagcagattgggtctaagatccgcggagcgctcgaccgcgccaagtctcccacagagctgcgcctgaaccagactgtacccgagtacacaggcgcagctctacgcccagacattgtgcttagaaacgtggccgccaagacgatggtgatcgccgacttggcggtcacgttcgaagaccaagcggctcgcgctcgtcactcctcgctgcagctcagccacgaccacaagactctcaagtaccaaccaatcgtggcggagctgcagcacaagggatggcgagtgcagactgctgccatagtgtacggcacgctgggctcggtgcagcccagcaacttcaaggcctacactgagaagttcaagcttcacaagcgcgaggctaggcagctggatctccagctgtctagccactgcattcgcgccagccaccgcatctggggctggcactgccgacagcaccgcgatcggcaacgaagcggcactgcctcgcgagcgtcgcgtgggtctgggggggccccgcggcgcacatcgcaggcaccggcacggcgataagctggtcatcatgaccgacagggcactacccaggtagggaaccgcccttaaaaaacccaggaagacacaaacaccctccacttagtgacatacatattttagcctagatttcagttacggagaggttactaactggtaaatacgaacacatattctgttctaatcagtgtgaaaactggttttcgccttttggcggactttttcactcgcatttttgggcaatcgtctgcggctagcttgctagcggcggacgagcggtctccgggggcgttcacctttcccccgcgaggccaactacaccgatcttctctacacttttctaattcgcctccgtcttcggtcttcggttgtcgggcttttttctttttgaccaatcagagcgcgccatgcgcctcttctggccaatcagagaccgggccctgtcctcggacagcgaggcctccacggccagccaatcgagtctcggcagcgacgcgtctttctatagcgcagctgacgaggccgatctggcggcccccgattggtccgactttcggccaatcagcgacgacgagggggcaggggtttacacttttgcccccgtttcgacttcaacttcaggccaaaatggcgatttggaccctccacgcgccgtgccactgctcggcaccggcggcgattcagcgggtgcaacttcgggcacgtgtgcaacacatgcagcgcccattgcacgccaagcggcatcgcgggacgacgcctcggccgcccaagcgcagccccgcccttccagcacgacctcgcgccgtttggcggatcgccatcaagacgtgcgagagccaggcggggtcgggcaaaatatacttactctaagtatgcccgaatccctgccctctcaggctgaacgcggccccatacttgatctaagtatgggaggatccctggcctctcaggctgtacgcgagaccc

SEQ ID NO: 1067 - DNA, 5135 bp, Patiria miniata
  source 1..5135: mol_type = unassigned DNA
ctgatgtggataccttggaattactcaaccgtgtcggagtcttttgtcttttgcgcccaacacctcatggataccatgcttgtcgctggagcgacgttacaagcgtgagggcgccctccatgccggacagctggtctgtgccatgtgcttgaagtcgttctcctcgacttcgggcttgcggcggcacatggcccggctgcaccggcagccttctcccgacgcctccacgccctcgactatgacggaagtgttcccgtacccccttccgaaggtgtggccgtgcgtggtgtgccgcgagaacttctatcacaatcaaaccttgaagcgtcaccagaagaattttcaccccaatgttgacctcaccaccgtctaccagtgctcagtgtgcgggcaggagtttgtcaccggcaggaaagcatccttccatttcaaagttcatcggcggatgtcagccagcgccatccctaccccgtctgcaatgccctcctcaccgatggatttgatccgaggcctcgtcggggaacccctgcctcctagccctgcccgtacaccgccaccacttgcccgatacatctccccagcgccccggtcttctttttcaccaccctggaatccctccccaccgccccggtcgcccaccccactgccacggccactcactccaccgccacgatcaccgagcccgccgccccggtcgccaacaccacctcccccggtcaccctcaccaccgccccggtcaccgagcccgccgtcccggtcgccctcaccaccgcccaggtcaccgagccctccgccccggccgtccacaccgccgccccggtcaccctctccaacgccccggtcaccgagcccgccaccccggccaccgatcctgccaccccggtcaccagactccactcaccggtcactcacatctcatgctcgatctccttcacggccagccacgccccctattcctgtgcagccccgacatctccgtccgtctacgcctgctcacccaggcgtagacaatgcagttccaccatcgcagcagtctgcaattgacgtgtggctggccgagctgtcacgctcggctgacttcgagtcttttgaggatgtgtgtgatcggtttgtggagtttgccgccgctgagggtcgaaacaacggacgcccagcccgcccagcgcaccaaccgccccgtgaccgcgggaaccagggacctcgcccccaacgtccccctcgtccccaccgccccgggcttggcccggagtttgatgcacaggaggccagtcgtctgcaaaagctgtatcggaccagcaagaagcgcgccatcaggactatcttgaccggctctgatgtccgatacagcggctaccgaggtcctcactagtggatttctttcacttgaagtattttccgctcgtgaggtcgacaccgacaccattgccacggataccagcctcctgtttccgaactccgcccaagcccgtgagtccggccaagacctgcttcgcccagtcacccagcgtgaagtctccctccgtcttggccggatgtccaactccgcaccagggaaggaccggttggagtaccgtcacatccgccaggttgatggcgcattccgcgtcaccctggaaatcttcaaccggtgcctgcgtgaaagccgggtcccatcctcctggaagacagcgaccaccgtgctgatccacaagaagggggatgccaccgacccggccaacttccgccccatcgccctccagtcctgcctctacaagctgttgatggcgatcttgtccgaccgtgtcaccacatgggccctggacaacgatctcatcagcagctcgcagaagagcgcccgccccggtgaaggttgctacgaacacacatttcttctctccaccgtcgtgaaggatgcccggcgtaaccagaaaaacatgtacgccgcctggctggatttacaaaatgcattcggcagcatcccccacgacgcaatgttcaccgtgttaacctccatcggggccccggagggcctggtctccctggtgcgcgatgtgtacactgacgcctccaccgacttcgtcacacccaccggccgcactgctgcagtcccgattcactcaggcgtgaagcagggctgcccgatctctccagtgcttttcaacctgacgctggaacttattatccgagcagtgaatgcttcagcgactcgggaccgcagtgcgccggtggtccatggccaggccgtccccatacttgcgtatgctgacgacctggtcatactcagccgatccagtgacggcctgcagagcctcctgacaacagcatccatcatggccaccaagatccagctgaagttcaagcccgccaagtgcgcttccctctccctcgagtgccgacgggggaccaaggtacgccctcttgagttcaacgtgcaggacaagatcatccccgcccttacagaggagcagcactaccggtaccttggtgtccccatcggcctctaccgcaccgacgacagcctggagaccttggtggccaagatgactgatgacatccagcggattgactcctcactcctcgctccctggcagaaactggatgccatccggaccttcgtacagccctgcctagcctacaccctgcgggcaggggactgtgcgaagaaacacctcaagagactgcggggacagctggtgaagacagcccgcaaagtatgcaacctgccgactcgggccaccacaaactacatctttgctgatcgtagggcgggtggcttgggtttcatcgacccaaacgtcgatgccgatattcaaatcatcacgcaggccgtacgcatgctgtcttcacccgacgacatcaccagagccatcgccaccggccagctgtcttccgtggtccaccgcaccatccaccgagcaccgacacaggaggagacggacgagttcttgtcagcatcaatggagggggactttgccaacagtgggaacagcggccaggcctcttcattgtggtccagagcacgtgcggcggcccggcgactgaaagttaccatcagcggcagcctttccggctcagtgatcaccaagtcaacagagaaccgggaaatggctgccaagtccatcactaccgccctgcgtgctcagtcccgcgcccactacacccaccggctgctgtccctgcccgaccaggggaaagttggccagtccctcaaccaagaccaatacatgaactcgtcctcgtggatgtcctccggtagctacatcctgttctgtgactggagattcatccatcgggcccgtctcaacacccttccgaccaacgcaacggcgcagcgatggaaacccaacaccagtcccgcctgtcgccgttgccagcacccgcaagagaccctgccccacatcctcaaccactgcccgcccaacatggtacccatccgccgcagacacaacctcgtccagcaacgcatcgtgtctgcggtacgccacgggcgggtgttcgtcgaccagcacgtccctgaggatcccaacccccgggagcgcccggacatcacggtcgttgagggcgacaaagtcaccatcatcgatgtatgttgccccttcgacaacggccgtgatgccctgatgaccgccgcagccgccaaggagaccaagtatgccgacctgaagcaggcgctggtggctgcggggaaagacgtcgaggtgttcggattcgccgttggatcgctaggctcctggttacctagcaacgagcgggcacttcgacgtctcggcatcgccaagcgcttccggactctgatgcgcaaactcctgcgcatcgacgccatcaagggatcccgggacgtgtacatcgagcacatgtgtggccatcgccaatacaccgattagcgaacactaatatcctgccmtagacgtgattgctaatccgcaaaccaaccggatctacagcctgaacactgaactttaatcttcacccatgtcacatctggacactaggtttttgctctgtttgtgttttcctgcctttwcmttggawctttcgcmctggaatttatttgtcgcttggattattttttttctcacaatttggatctattttcgtttgttcacttcgaactctagctgccctttcttcggacactgaactttaatcttcgccatggctgtcagtcgccggttcacttgctgcggtgggatcctgttgtgataatccccgtgcattgcccatggatttatttccgccttagttgttcctaaccttggatttattgctgtgggtgatgcccgggttttgtttacatcgggatcccgctgcggctcggtgttccatgcgactggcagcccctttgtttactctsgactctattcattgttgtatttcttccacactggccagtgatcacactgctgtgtttcccgggaagatatcctctgcggttttcacgctctgggtgtctccccgggcaacgcactggttgcttgctgcgccatcacccttttcgtttatattcattttcagtctgccgttatcttggccagcgctcattcttttgtgatggccgtggactgaccctctgcggttttctgcggtcascactctcggtgaatgctgtgccaccatttttcatttgtttactttttcagctacaattatcctggccagctttcactcttttgtgatggccgtggacggaccctctgctggttttcacgctccgggtttgtctgcggtcagcacccttggtgagtgctggtcgtttgtttgctcattttgcttagttcaccattatctttmttctcttttgtwtggttttcctagcggttgtctgggagttgagctgcagttgtctggtcttggttttacccccatttgttttcttttaacgcggggcgtattgccttgaccggccgtctcagcttttctcctagagcaaccttccgttcatccaacttttagttttctcagttcttggccattccggttggttaatttttatttatacttaattttatgtttacattttctggttggagaccattttagcttgttttaatagcttttcttctttaattaataccctctgccattgagggtttttattactattaattttgtttactctttgtaacttgtttgattgaatattttaataaaccac

SEQ ID NO: 1068 - DNA, 4285 bp, Phytophthora sojae
  source 1..4285: mol_type = unassigned DNA
agacgagcaacgcgctggggcccaagacctggcacgaacgacactgcccaggctgtgaacgacgagcacgctgctaacccggcagcgcaccggcctctgggctccgctgcaccggttaccggtgcaacacggtggggtccacgtcacggcgcgatcggggcagcggctgtagctcgcctgctcacaggcctacccacggcaccagcaccagctacgcgccggcctgcttcggctcggcgctgcccagacccgcccgctccccccgcggccacgacgacagcccccgatgcgatggacgtcgacggagggccggctatgcccgagccgtgggtgctccgcttcgacggcgcctgccgccggaacccgggacctggtggagctggtgccgccttgttcaagccgtgcgggaccgtggcgtggacgtgctcgcactacatgccaaacagcagcgagaccaacaacaccgctgaatacacggcgctgctgcttggcgtgcagagtgccgtccaccacggcgcctcgcacctggagatcgaaggtgacagccacctcgtcgtagcgcaggtcaagggcaccttcgcctgcaggaacccgcgcctccgccagctgcgcaaccgcgtccgccacgccctccgcgccgtgacgtccttaacgctcaagcacatcgaccggaaggcgaacgcgcacgcggacagactggcaaaccgggcgctggacctgaagcgttcgctggctgagtgcggcgagcaccaaggggcgatggagagctgcctccacatgaatcctgctgcacaacgccagcgcgagcaacccgcacctcctgcccgccccgcgtgcgcacccacgcgcgccgagtctgccagcgatcatgacgaggacatcgacgcagagattgccgcgcgcgacggcggcgaggcgttccccacgctgcctatcgggcccgggacggctccagcgcggcagccgcgccttcgactgcggcagctgaccgaagacgagcaggaagcggcggcgtcggccctgcaggccatggcggaggagctagcgtgcaagatcgaagacgcagacagctggacctcgggcgatggatacatcagcgccatccccagtcgcatccggcagttgctgcagcccttcacagcagcccagccccaccctcggcctccactgcaacagcagcgacagcgaccgccccgggtgacgcgcactcagcgcgagcatcgactcgacgaggccctcgacgagatggcggcggtgcagcaggagcgacccaccagcagatcggccgtccgccgtgcgcggcgccgcgtcggccggatccgcgcctcgatgcgccaacagcagctccgccacgacttcgctcgcaacgagagcaagtgcgtcgaggacattctgcgtgctgcgtcggcggagaccgcagcggaggagcacccggagacgtgccccatcgactcgggcacgctccacgagcacttcacggcggtgaactcgccccgcatcaacttcctaccagatgaagcttgcggggcgttgttccgcgaggcgatggccgacgtcgggacaccgcaggagcggcggagcgcgctcacggacgagctgacgatggacgaggtggaggaccagctcatgcaagcggccacgaactccagccccggccacgacggcgtgggctacgacatctacaagaagttcgcggcgcagctggtccccctcctccacgcagccttccagtcctgttggcgccaccaccgggtgcctgccctgtggaaggtggggttcgtccgcctcatccacaagaagggcgaccccaacgacccagcgaactggcggccgatctgcctgcagaccgcgatctacaagctctacagcggtctgctggcgcgtcggctgtcggcgtacctggaggcgaacgggctgctgctcatggcgcagaaggggttcagggcgtacaatggttgccacgagcacaacttcgtggcaaccacgctcctggaccaaacccgacgcatgcgccgcaggctgtaccaggtctggtacgacctgcggaacgcgttcgggtccgttcaccaggacatgctgtggtatgtgctccgcctgctcggcgtcgagcgtgcgttcgtcgagcgctgcgacgacatctacgaggactcctacttcgtcgtcggcaacgcggccgacggagcgacggaaccagtgcggcaggaggtgggcgtgtaccaaggctgtccgctcagccccctcctgttcatcgccgcgctggtgccgttgctccgagcattggagaagctcgacggagtgggcgtcgcgttggcggacggggtgcggccatgcaccaccgcctacgccgacgacctcaaggtgttcagcgacagcgcggccggcatcacgcgctgccacgctgtcgttgagaagttcctggagtggacggtgctgcaggccaatccaggcaagtgcgccttcctggccgtgacacgcaacgcgcgcggcaaccccgcccacgacaaggacatgaagctgtcgctccacgacgaggaggtctcaagcatcaagctgcacgacagctaccgctacctcggcgtgggcgacggcttcgatcacgtgcgccaccgtctccagctagagcccaagctacagcagatcaagcgggaggcggtggcgctgatgcagtcggggttggcgccgtggcaggtggtgaaggcgctcaagacctacgtctaccccaaggtcgagtacgcgctccgccacctccgaccgctccagtcccaactgcagggcttcgaccgtgtggtagccaagggcctgcggcacctgctacgcctgccccgctcggcaaccaacgaggtgctctacgcaccaacgtcgagcgggggcttggggctccagccgctggtggaaatgcaccgcgcgctgcagatcgcccatgcgtggcagatgctgcactcgaaggacccagcgatccgggaagtggcgcgcgcacaggtgtggcaggtggcccgcaagcgtcaccgcctccgcgaagaacactggcgggagcgtgacgacgagctcgtgcggtgcttcctcaactccgagctcgccgcctcgccccacgcggaggcgctgcgccgccacggcgacatcgggtcactgtggtccgacgtacagcggtggctgcgcatctaccacctcagcctggtggtgcaggacgaccgcaacggcctggacccgctcggcctccgcgtgccgcaccacgccaagtggctcgaccacaagagcgtgctgcggcacgtcaagttgcacctcaagatccgccaccagacccgatggaagggtctggcggaccagggcaagacggtgcgggcccacggcggtgtcggtgccaagttcatgtcgacatgggcgggcctgtcggacgacgactaccgcttcggcgtgaaggcccgcctcaaccagatcgacacgaacgccgtgctcaagcgcaagcggctgcggtcgcacaagacctgcagggacccgacctgctcctcggccgagacgctggcccatgtcctcaaccattgcgagtccaacatggacgcaatccgccagcgtcatgacgacgccttggagcagatcgggtccaagatccgcaacgcgctcaagcgcggcaagtcgaccgcggagctgcgcctgaaccagacggtacccgagtacacgggcgcagctctgcggccagacatcgtactgcggatcgtggccgccaagaagatggtgatcgccgacttggcggtcacgttcgaagagcacgcggccggcgcccgccactcctcgctgcagctcagccacgaccacaagacactcaagtaccaaccgatcgtggcggagctgcagctcaaggggtggcaggtgcagaccgcggcgatcgtgtacgggtcgctgggctcggtgcagcccagcaactcaacacctacacggaaaagttgaagctgcacaagcgcgaggctcgacagctggaccttcagctgtcgagccactgcatccgcgccagccaccgcacctggggctggtactgccggcgccaccgcgaaggacaacggagcggcaacgcctcgcgagcgccgcgtgggtctggggggggcccgcggcgcacatcgcaggctcgggcacggcggtaagctggtcatttgaccaacagggcactacccaggtagggaaccgcccttcaaaaacccaggaagacacaaacaccctccctttagtgacatgcatattttagcctacatttcagttacggagaggttactaactggtaaacacgaacacacat

SEQ ID NO: 1069 - DNA, 5108 bp, Pythium ultimum
  source 1..5108: mol_type = unassigned DNA
gcggtgtacgcgcacaacgccgcgctcttcgagtgcacgttgtgcgcgcacaccgcgcgggatctcgccgcgctccagcagcatcggcgctccgcgcaccgcagcgtccgctttgtggatcacttccacagcggatgcgcgtgcggcgtgagcttccactcgcgtgcggcggcaaccaagcacgcgcgcgaatgtccagagagcgcgttctcggtcgccgccgccgcgcgcactgcagcggccaacaccgcaggtatgtctctcggcgccgacgaacgcgaccacctcgcgtccgtcggcgccttgcatgatgttgcatcccccgcttttggcaacattttgccggttgcgtttgcgaccgcggcagacgcatcaagcgccaccgtgatcgcagacgcagccatgcagcacagtgctgtgccctctgctgccgcccaatcccctcggcgtgcgcacgtcccccccgtgccgcgcgccaccacgacaccatccgcgctgcggattggtggcaaacgccgccgcctgaacgacgacggcgacaacgaaaacagcgacggccgcgacgccgacatcgagatgcgcgccgacgacaccgacgcaccagcgccgaccaaccccgcgaccagtgcggctgcaacgcccgcgcgcacagcaccagcaccaacggatgccgcgaccgcgcgccgccgccacacgcgatggggacccagagtgctcgtgaacgtggcgcgccttccgcgccgcactcacacacgctggggccccgcactccgccgcgaccaccagcatgcagcaaacatggagaactcgaatcagctgctggtggccgcgacggacaatgcagcgatggcgcggaacgcgagcgcgacgccgagcgcgacatccgcgccaacgagcgcgactgcaacggcgacggcgacggcgacgacgccgacagcgacagcgacgaccgcaacgacgcgcgacgacgcagcagacgaccgcgagcgacggcgacaacaacgacgagcgcgccgaccacgaccacgaccacgacaacgagcgcaacgacgagcgcgacgacgccggcgacagacagctccccctgggtcttgcgctttgacggcgcatgtcgccgcaacccaggccccggcggcgccggtgctgcgctcttcgagccaggtggcgccgtggtgtggacggtgtctcactacctcccgggcagtgagaccaacaacaccgccgagtactcggcgatgctgctcggggtgcgcagcgccatccaccacggcgcgacccgactccgcgtcgagggcgacagccacctcgcgctctcgcaggtgcgcggcaccttcgcgtgcacgaaccggcgtctgcgcaagctgcgcaaccgagtgcaagcggcactgcgcgagctcggcgactaccggctcgtgcacatcgaccggcaagcgaacgcgcatgccgaccgcctcgcgaaccgcgccctcgacctccgcaagaccaaggtcgactgcgggccccacgcaacgaccaccgacgcgtgcgtgcagccggcggaaatcctggcgccaacagcccgcctgtccagctccagctccagctccagctccagctccagcgacgagccgatgccgggactcgaggagccagctgcggacgacgagaccgacgctgacgccgaagccgacatcgcaatgcgcgatggaggcgagatttttccgacgctccagatcggccccggctcggcgccagcacaacaaccgcggctccgcctccgccagctctcggacgacgagtccgaggcagccgcgcgcacgctcgagcacttcgccaacgacatggcgagcaagattgcggacgctgacgactggcgttccggggagggctacatcagtgccatccctgtgcgcctccgtgaactcctcgcaccatatgcggtgccaatcaggagccctccacggaacgccagctcccgtcccccgcgcccgcaatctcgtccgcctcgcccgccgcgagtgactcgacaccagcgcgaacaccgactggatgaggcgctcgacgacctggccgctgcgcagcgctcgacatcgaccgaccagcgctccatccgcaacgcccggcgtcgagtcggccgcatccgcacggcacaagcccaatccgacctccgcagccagttcgccacgaacgagcgcgcctgcgtcgagagcatcctccgcgccgccaaacccgacggcaccgagcctcaagcaagcgcgggcacgtgccccatcgaccgtgcgacgctccacgcgcatttcgcgggcgtcaacacgccgcgcgagcgcttcgactttgacgacgcgctgggagccgactttcgcgccgcgctcgacgttctgccaccgccggaccaagccgccgatgcgttcgccgacgagctctcgctgggcgaggtcgaggaccagctcgaccgcgtcgtcgcctcctccagtcccggcctggacggagtgggctacgacgtgttcaagcgctttcggctgcagctcctgccgctcctccacgctgcataccagtgctgctggcgccaccgccgcgtgcctgcaacgtggaaggtgggattggtgcgcctgctgcacaagaaaggcgatcgcgctgagccaaacaactggcggccgatctgcttgcagcaggccatctacaaggtctactctgggctgctggcgcgccgactgtcgcggtggctcgaggcgaacgaacgcttcaccaccgcccagaaaggtttccgggagttcaacgggtgccacgagcacaatttcgtggcatcctcgctcctcgaccagacgcgtcggctccatcggaagctgtacgctgtctggtacgacttgcggaacgccttcggttcaatgccgcagcccctgatgtggcgcgtcctcgctcgcctcggagtcgacactgcgttcctccagcggtgcgaggacatctacgcggactcgtttttcgtcgtcggcaacgcagccgacggtgccacggaccccgtccgacaggaggtcggcgtctaccaaggatgcccgctgagcccgctgctgttcatctcagcattgattcctctcctgcgggctctgcagcggctaccaggcgtcggcgttcccctggcggacggagtccgtccgtgtacgaccgcgtacgcggacgacctcaaggtgttcagcgacagtgccgccggcatccagcaatgccacggcactgtcgctcgattcctccgatggacggggctgcgcgcgaacgcgagcaagtgtgcgctgctgccagtgacaaccactgcgcgcggcaaccccgccatcgacgacacgctgcagctcgagctgcacggcgacgccatcgcccgcctcaccctccaatcgagctatgcctaccttggggtgggtgatggcttcgaccacgtgcagcaccgcgtgcagctcgcgcccaagctcgcagagctgaagcgcgacgctgtggcactgctgcggtcggggttggcgccttggcaggtactgaaggccatcaaggtctatctgtacccgcgcatcgagtacgcgctgcgccacctccgaccgctgcagtcgcagctcgaggggtttgatcgcgcggtagcgaaggggttccgacacctcctccgtctacccgcgaacgccaccaacgagctgctctacgcgcctgtgtcgagcggcggcctggggcttctgccactcgtggagctccacaaagctctgcagattgcccacgggtggcagatgctccactcgaaagacgccgccgtgcaggcgatcgcgcgcgcacaggtccgccaagtggtccaaaagcgctacacgctggacgcggaccactggcagggacgagacgacgagctcgtgcagctctttctcaacagtgagctcgccgcctcgccccacgcgaccatcaagcggcgcaacggagacattggttcgctctggagcgatgtccagcgccacctgaagacgctgcagctccggctcgagacgcgcgagccgactgccgacgcgcctgactcccccaacggcctcctccacctccgtgtgccgcaccaccgcaaatggctcagccacaaaacggtgttgcggcacatgaagctccacatccgcttgtgccacaagcacaagtggcagagcatgagcgaccaggggcgcacggtgcgagcgcacggacaggctggcagccactttgtgtcgcgcggggtgggcctatgggacgcggactaccgcttcgcgctccaggcccgcctcaaccaactcgacaccaactcgacactcaagcgtcgccgccagcgcaccaatgccacctgccgcgcgccgaactgctcgcgcaccgagacactggcgcacgtcctcaatcattgcgaaaccaacatggacgtgatccgccagcgtcacgacggcgcgctcgagcagattggtgcggcgatcaacgctgccatcaagggccgccgcaccgacaccgaggtccgactcaaccagacagttccagagttcaacggaccggcgtggcggcccgacatccaggtgcgcgacgcgcgctccaagaccatggtgatcgcggacctcgcgatcaccttcgaggaccagccaaacgaccagtccgccagctcgtcgctccaacacagccgcgaacacaagatcgcgaaataccagccaatcgcggcggcactggagcggcaagggtggcgggtacacacaagtgccattgtgtacgggtcgctacgctcggtccaccccagcaacttcaccgtgtacacggagttgctgggactgctcaagcgcgacgcccgtcgcctgaacacaacgctgtcgtgccactgcatccgcagcagccgacgcgtgtggaactggcactgcggccagcacagagcacgacagcatcagcgatgccaagaaggccgcgcgcacgggtccggggggaaccagcgcgcggaagggggcacggcaacaacatgatgcgggtcatattgaccgaaagggcaccatccacgtaggacaccgccctcaaaaacccagttcagtttattgacaccctccacttagtgacatgcatattcaaaccgatacatattcgttaggagaggttactaactggtaatatatcaccatttc

SEQ ID NO: 1070 - DNA, 4391 bp, Strigamia maritima
  source 1..4391: mol_type = unassigned DNA
ggagtgttcttttcggagacgccgcctactttagaggagagaatccccacgggcatcctcatttgatctgatccatcgagtatctgcgaatagtcggcgcactccttttgccatgatcccgggggtctcatggtaaaaaggtttgtggcacggcttagttgacgcccctcttccacgtcactcggcctgcatcgatcgactgctctctcctcttcctccctccctcctcttcacgctctcttcacgtgaccccttcccatcccgcccctcggcttttggcaaagatctgtgtgtcctccaaagcacccatctaccatttgctcgagttgcgattggtcgaagctgccacgccactcgtctactctgcctctctgaccccttcccccctctctccctctgccgccctcgcctctcgggtcccttcccatctccctcctcccatccacgtgctccctcctctcgtcacgtgatcgttgcggctcgacatggccacggtcagactcaagtacccctatcctcccgagggtatcttgtgtggaccgtgtgccgccaacacgaacgcccctcagacgcggccatactccgataagtcggggttggccaagcatctaaagctctatcacaaagccactctagtggtggagtgtcgtcactgtggtcacgaggagtctgatctgaggaagatgaagaagcacatctcgacgaaccaccccgtcgctgcggccgccgcgcctaccgtaccccctcgcctgggtcccaccgcccctcctccgccccgggttatcctccgccctcgcttcatcccacggcctcggactccctctccttcctcctcctcgtcatcggcgtcgtctccggcctcttccagaaggtctgtatcccttccccctgcgagtccccccgtctcctccgcttcctccccggccgctcgctcgggtcggaattcgccggactcgcaggggacggctccggtcactccgatcggtaccgtacggaactcgccggccggtagccctgccctcagctactcgacggcctccccgatcgcctctaccatcacgacgccacgccatctctcgcctgcgtcccccgctctctctgccgggcctggctctctcggcgcgtctccgcccgtctctcccacggccgctacagtaccccccgctcctccagctaccgtacccgcagtgatggcggctaccgtacccttcgtcgccgcgactaccgtaccctccgtcggctctagcacggtaccccagcgtcccgccggccctcgacgaccccctcccttccctatcgacgattggatcggaaggatcgcccgagtgtcatctctgccggaattggacgccgtctcaaggttgctcgaggatgaagtggtcaagagacgcccccctgaccccaacgccagacccgcctcactccatccgacacgccgccctccccctccatctactcgccctcgtccctgccatgggaccggcggaacttcagtctctctggcggcgctcacgtcctcgtgcattcgcgaagatcaccgagggagcctcccccttttgtgcacttccggttgggacagtccatggccactttctccaagtccatcaagccactgcccatcttccaacccctgtccctcttcctccactccgccctcctcgctcctcggaccccctcgtcactcccatctcacctggagaggttctggatcgactacgccgagccaccgacactgctcccgggccagataccatcatctactctgagtggagggccatcgacccgactggacgactcctctcctctctcttccagaaggtccagaccttcggggcgccaacccgatggaaggagagtacgaccacactcatccacaagggtggtgaccacacagcgatgtcctcttggcgtccaatcgccctcctctccacagtggccaagatctatgggagcatcctgtctcatcggctgacgacctgggccgtccagaatggtcgtctctcgctctcgcagaagggattcctgccatttcgaggatgcctcgaccagaactaccttgttcagtcgtgcctccaagacgcccgccgcaacaagaagacactctcactcgccttcctcgatctgaagaatgcctttgggagcatcccccacctgaccattcgtcactccctcgagtggctcggactggccccttcatcgatcgacattcttgaagcgtcattcctgggatcgtcgactcgcgttcgaaccgagactggactcactccccccatcagcctcgacactggagtggtccaaggagctcccctctcccccatcctcttcaatctagccatcgaacccctcctccgcacggtcccctctgcccattctggattttctctccatggccatgtcgtctctgtggtcgcctacgcggatgacctcgccatcctcgccccatctactcccgctctacaatcccaattggatgctatctctggcatggcagattgggcgggcctctcattcaatccggccaagtgcgcgaccgtcactctcactgggaaggataactctcgtgatacgctgtccctgcaaggctcccccgtcccttccatctctgacggcgatgcatacaagcaccttggagtccccactggcactactaccttccccagtggcaccgatgcaatcaagaagatgacgacggatctacaggccatagaccactccgacctcgcaccggcccagaagctagatgccctccgcactttcatcatgccccagctctccttccatctctctcacggctcagtccccaaagcccccctcactcaactggacaagaagatcaagcgggctgccaagcactggctgttccttcctcaacgagcctcgaacgaaatactgtacatgtcccacttgcacggagggcaatccctactccccctctcggtgctagcggacatcggacaagtgactcacgccgtcgctcttcttcaatcaagggatccagccgtggctgacctcgctctccggacttgccgagaagtcgcatcgaaacgggcaaagaagacggtcaacggccccgagttggcccagtacctctccgggtccactgacggaatctactgcaccccgacttctgacatcccgagtctctggacgactgcccgagctgcaacacgccgactctcctccactctgccactcacgtggacatccccccttccctctggcgtccccttcctttctatcaatgggtcccccctctccccattccgagtacagtccaccctcaccaatgccattagacataaccacctctccactctcattgccaaacgggaccagggaaattcctaccgtacctcacacgaccccgacccctctaactactgggtcaagggaggagacttcctccgattctgtgactggcgattcatacacagagcccgactgaacctcctcccagtgaacggggcgcgccgatgggacgcaaacagcatcaagacgtgccggcgctgtggtgcgcccaatgagacactcgcccacgtgctcaacgtctgccctgtcggactgccggagatgaagaagaggcacgatgcaattcatgcccgcatcaagaaagccctccgaccctctccccatacggtagtacaccacgaccggacagttcccggatgcggccccctgagaccggacattctgagaatcagcgagagagacaaatctgttgccattgtagatatccacgttcccttcgacaatggcactgatgcggttgagcgagctcacgagacaaagcgggcgaagtacgaactgatccggcggcactacgaacaccaagggtatcgagtcacgtttgactcactagtagtcacagcgcttggtagactgtggcgggggagtgaggcagcgctacaagcgctccagatctcgtcacagtatagtaagctcctccgtaagttactcgtggctgatgccatccacggctcgagaaacgtgtacgcccatcatatgaccggtatggttatgtgatgggagagtgaggaatcttctccactgtgcaaaaccatacagtcagaagatgctaactactagtttgataccctgtgccccctgcaatgtcccgcgtgtcgtacccaagcccggctggcattgagacacattaggctctcgctcccccgtatactctcataatttcgtgtacgctaatcctaccctacccctccctttgaccactcacccaaccatgtgtatagctgtgctggtgatcccggggcggttattcactggttatcatatcattctaaaatgatctttgatctctcaattaacaactaacttatttctgtttgtttcattgtttcacctcgtaagaggaagttcattgtgcgataaatcaa

SEQ ID NO: 1071 - DNA, 5560 bp, Strongylocentrotus purpuratus
  source 1..5560: mol_type = unassigned DNA
aaggctcaaaccaggctgccaaccaagctgccagcttaggcaccaaccaagctgccagtccaggctccaaccaggctgcccaccaatctgccagcttaggctccaaccaagctgcccacctagctgccagcttaggcaccaaccaagctgccagccgaggatccaaccaggctgcccacctagctgccagcttaggctccaaccaagccgccagcccaggctccaaccaggttgccacccgaaagtctgccagtttaggcaccaaccaagctgccagccgaggctccaaccaggctgccactcgaggctccaaccaggctttcacccgaagcattacccaggctgcccgtttaggcacaaaccaggctgccagccgaggctccaaccaagcaaccagcccaggttccaatcaagctgccagccgaggctccaagtaagctgccagccgaggctccaaccaggctgccactcgaggctccaaccaggctttcacccgaagcattacccaggctgcccgtttaggcacaaaccaagctgccagccgaggctccaaccaagcaaccagcccaggttccaatcaagctgccagccgaggctccaaccaagctgccagccgaggctccaaccaggctgcccaccaagctgccaacttaggctccaaccaagctgccagcccaggctccaaccaggttgccacccgaatctctgccagtttaggcaccaaccaagctgccagcctaggctccaaccaggctgccactcgaggctccaaccaggctttcacccgaagcatcacccaggctgcccttttaggcacaaatcaagctgccagccgaggctccaaccaagcaaccagcccaggttccaatgaagctaccagccgaggctccaaccaagctgtcagccgaggctccaaccaggctgcccaccaagctgccagcttaggtaccaaccaagctgccagcccaggctccaaccaggttgccacccgaaactctgccagtttaggcaccaaccaagctgccagccgaggctccaaccaggctgccactcgaggctccaaccaggctttcaccccaagcatcaaccaggctgcccgtttaggcacaaaccaagctgccagccgaggctccaaccaggcctccaaccaagctaccagccgaagctctgccagattaggcaccaaccaagctgccaccgttagaggcccagagcccaccaatcccataacgtgtgagatatgtgaagcttccttccacacctccgccggtctccgtcgccacacggccaggcttcatcgcaccactgctgaacacactgacgacagcatgagccattccatcaccgaggtattcgactatccgttgccctcccgttggaagtgcacagtgtgcttagagaactttttcaatcagcagaccctcaagcgccaccaggcccggcaccaccaaacgacctccttcctctacgtctttcgatgctcagcctgccaggctgagtttgattctgctcgtaaggcttctaatcactggcagagccacaagaggaaaccaatcctctcacaaccagcagtgaatgaaatcccttcttcgggtctagatccatcccctccaaggtctcgtccaccggtcgaggtgattggttcttcttttccagatgatgtgtctatgctgtcagaaccatctaccccctctacatcactacaaatggacccagaggtggtgcatcctccgtcacgatccatatccttttcgcccatgcatcttagccccactcagccagccagcccgattcaaataggcgttgaggtttcctttaactcttccagctcacttcagatggacccagaggtcgtgcagcccccgtcaccgtccatttccttctcacccatgcatcttagccccactcagcccgccagcccgattcaaataggcgttgaggtttcctttaactcttccggctcacttcagatggacccagaggtggtacagcccccgtcaccgtccatctccttctcacccatgcatcttagccccacccaaccagtcagcccgattcaaataggcattgaggtttcctttacctcttccagcccacttcagatggaccccgaggtagtgcagcccccgtcaccctccatgtcctactcacccatgcatcttagcctcactcagccagacagccccatcccagtagacattgatgtcataccagcggctgaggtccccttgcctgatattgagattcctccttctccggatagacatccagcggctgaggtccccttgcctgatattgagattcctccttctccggatagacatccagtggctgaggtccccttgcctgatattgagattcctccttctccggatagacatccacaatcgcctccacgaccagtgatgatggagcagccagtccatacaccaccgccggccgatacacagcaggctaatggtccacagcattgggtgactgttctagccaacgccaccaattgggaagacttcgggagagtctgtgtagagtttgctaatcatgctgtagaagcagcccggtctcggcaagatgcacctcaagtaaggcctgctgcacagagacagcctcgcagaccgactagacctcgtcaacccacgtttgatgtcagggaggcaagccgtttgcagaagctctacaaacgcagcaagaaaagagcggttcggcacattctaagagatgacgccccctccttctctggcagcaatgagcaactgcttgactacttcaaagaaatctatgctcctcccgagattgatgaaaatagagcacaacagttggcagagtctctctttaccgatcttgaggaagcgaaggagtctgcggccgccctaatgtctcctatatctcagcaagagatcagtacacgcctttctcgaatgagcaattctgcccctggaaaggaccgcctcgagtatagacatattcgacaagctgatggtgcatgccgtgttacccacatcatgttcaacaggtgcctacaggaacaccgtataccatcagcatggaaggaagctacaaccatcctcattcacaagtccggtacaaccgatgacccagcaaacttccgcccgatcgcactccagtcatgcttgtacaaactcttcatgggcatcctctcagacagaatgacacagtgggcgtgcaatcacaaccttctcagcccagagcagaagagcgctcgcccatgtgagggatgtcatgaacacacctttcttctgtcgtctgtcatcaaagataccaagcgaaaccagaagactgccaacatcgcctggctagatcttaggaacgccttcggaagcatcccccaccaggctatccatgcagtcctgacaacgataggagcacctgtcagcctggttatgctcctgaaggacacatacacgggagcatccacatcctttcttagcacgagtggagagactgacccaatacagatccagtccggtgttaaacaaggatgcccgatgtctgccatcctcttcaacctaaccattgaacttatcatcagagccgtcaagaagaaggcaacggatgatggcctcgggcttgtggtgcatggacaacgcctatccatcatggcctacgctgacgacctcgtcctgatgagcaagacaccagaaggcctggatgccattttgtctgtggcatccgagcaggcagaaaccctacgtctggcattcaagcctaccaagtgtgcctccctctcactctcatgtagacacggtacatctgtccttccacgcgaatacaccgtccaaggtcacctgatgccagctctcgacgaggaagagcagtaccgctacctcggagttcccttcggcttacctcgtttcacaaatctcaaggacctgatcggcaagctgaagggaaacatcgagaccattgcatcatcattgctggccccatggcaaaagttggatgcaatcaaaaccttcgtccaaccaggtctcagtttcgtactgcgggcagcggactacttgaagtcggacttgcgttctctgaaatctgccatcaccaccaacgtcaaaaagatatgccagcttccccttcgggcggccaacgcatacatcttcgcggctaaggaatcgggtggtctagccttcatagaccccaacgtagatgcggacatccaagtcatcactcaagccgttcgtgtcctgtcgtctgacgatgaagtcgttcagacaatagcaacatcccaactcaagtcggttgttcatcgcacaatccacgcagtccctactgaagaggacatcgacaactacttgtctggcagcaacgagggcctgcttgccaattcgggtaatagcggccaagcttcttctctgtggtctcgaaccaggtcagccgcaagaagacttcatcttaccctcagagccaccaccagtggtacagttgttgtcaaccagcaggcagacatcgaccacacaagggacattctaccagcatcaataacaagaggactgaggctcatccaacgaaccacaaatgctgagaaactcaagtccctaccagaccaagggaaagttgccagatccctcagcaacgatccattcgctaacggctcttcttggcatgcaactggaaagttcatccgcttctgcgattggcggttcattcaccgagccagactgaactgcctccccacgaatgtagccacgaagaggtggaaggcaaatgcgaatggcaagaatggccatcaacaagagacactgcctcacgtactgaatcattgcctacccaacatggtccccatcagacgccgccatgacaacatccaacaacgactggtaacagccatcagacatggcgatgtctttgtcaatcaacatgtaccgggagaccccaacccaagagaacgcccagatatcactgttatcgagggaaacaaagtcacagtcatcgatatttctgtccccttcgacaatggtcccaacgcatgcaccacagctgcacaagccaaagtcgaaaagtactctgccctccgtcaagccttgagagatatgggaagagacgtcgaagtccatggcttcatagttggtgccttaggaacctggcaccagggcaacgaacgtgctctcggacgcctgggtgtcagtcgctggtacagaacactgatgagaaagctgtgctgcattgatgctatccaagcttccagagacatttgggttgaacatgtcactggacatcgacagtacgagtgacgaaatgttcaatatatgacattctaatgttcatgtattttttgtttgcttgacaaagctagatgaatatattccctgtcctactacatacatctcgatgtgcccttgctagacgatccattggtaaccatgatatcaatggattaacacatgatctgtaaacaatatatgatttacacaatgtatttattgtttcaataaatctgttcttttcactttaatacatgaaacatgactgtgccttctccaactggagacctacataatttgttaaaatgatataaatatttcgaagatgaaattattattaataa

SEQ ID NO: 1072 - DNA, 5469 bp, Trichinella spiralis
  source 1..5469: mol_type = unassigned DNA
tttctggtatgaatcccaagcggattcgttacgaaatttgcataagtttttgaaaaaataggcatttggtcgagtgctcgcaccaccatttgtcgcgggtcgtcctgatattgcactacattcaggaacggcctattcccttcggggaattgtgttttaggaattggaatcggtttggttacgatcggtcgagtggttcgtgagatcgagtgacagccgggtggcagcgacaatgtgtagtgcaaagacaccagccttgaagtcgggtcgccgtcgcggaaaagaggtcaactatgaaggccaaattgtacgggtagaaagacggcgtggatctcgcagtagtacgagcgcaacggaccttggtacgaggatggttacgcgtgggcgaaagaagctgatggaggcgtcggttcgtgaagcgggtcaccacggaggtgaatcggcgagtactgtggacgtcgacgtggtggaatcgaagaaaattacgggtaaaacggcgcgccgtaatagaagagcgccaagcggtgatggaaaaagacgagagagctgtggtgcggaatgtggccaagccgtatgcggtaacgctgttgcggaccgtagtgaggccagttcgccccgcactcccaacgttagtaaatctggtcgtgacaagtgtggtcaacccactataaaagcctccacaccatcaccaccgaaaagaaaaccgaccacttcgagtagcccacgtacgccatgcctctccaagcgcggagcgagatccaaaattccgtccacgccagatacaccatcgacttctggcggttcaggtaagcaacgtgttttggtgtcgccgttgcttaggacggaaaaattgcccgacctcgaagttctacaaagaaccgaggaacaggtgactgtacgggcaactttcccaatcgcccaggcggtggtctgcccactgggatgcgagaaaccgtacacggccgtgagaccagacggtcaatttgcgcaccaaacgctgactcgtcatttcatgcgagtccacaattgtcacagcgtccagtggcattaccggtgtcgcaattgtaatacggatttcttgccggcagatcaccggtatcccctccgagttgtgaacacccacgttcgcagctgtgttagccggtgggagataacccggaagttgggagagagcgaagatttgcatggagttcgttgcgatctttgcgattacgtaggcgtgtcgaaaagagccgtcggattgcatcgccgccggcacgccaacgagaacattatgcaaaatacgggtacggccgctcaaatcgaggccttgagcaaacaagtcggcgaaatacgtgtagcaggcgactatagtcagtttaagtttggtaaacgggttcggcaatacgtggcaccaacgcagaggcgagacgggttggacgaagaggaggttcatgaagccgaagaagaggaggtgccagccgaatcacgtaccatcctaggtgaacccagcaccgcaactgctataggagctgaggagatctctgcaacgggtccagttcgagcagacacagctgctcagcagatgatctgccggatcgggcaatggtgtgtctggccgcaggactaccattcgatcccggcacctcagtgctggacggacacgttgatggacctcatgattgaacaaatcgttctgcagcgctatcccgatggtgcgggtgtgagcgtgatgagctgctcagcagtaagcgcagccatacaccacgagatatctgcagagtttgccgctcaggtcatgtcttcacatgatgccagtttgtattgcatcattcctgtgaatgtacgtaatcattggcagatgattgtgctggatgtggctgaacgagtagtccattactactgttctctccgcgagcataacactgttgttttatcgtctctgttatcgctagtggagctgagtggtaagcacactggctgcacctcgtggaagatcgagactcacgatggcgcgccggtgcaaacgaatgcgttcgattgtggtccgttttcgtgcttgtttttgaagcacctgctgcacggcatcgacatgaatttcggtgatcgggagtcggcggctttgcgcaccgacctgaagtttatgatcgatgcggtatccactcccgtcgttccggcgacggataagctaaagaaaaaacctgacggctcagcgactcagttgacccagttccagcagaagttcctgagcgcttctgacaactggcaatctcctgatgtcgacttgcaagcggtgtatgacgaagtggtggagagtattgtgtccggacacaatgaaccgagctctcgtaacaccagccgtttgcaaaagaaaagtccgggtaaaggaggtaaaggacaggttcgccgacgcagtgcggtaacgcgtgacccggcatggttgaaatctgcgtcagcggttcaaaaggcgttcaattcggcaccggcccgtactgtgaatgcaatcctccggcgtccgaatgcctgtccttcgtttacagccacgcaagtggcagatcattatttcaatctcagaccggcggttacctcgcttgcacccgaggttattgacatcttacctccgcccgccactgaccactcgatgcttgttgcggagttgagtgagtcggaggtctgggaaaagatgcagaaagcacccaactctgcgcctggtgcggacaggatcaccattcgtatggtgcggatggcagatccaggtgcgatgattctcaccaggttctaccgtgcctgtctactaagaaaatgggtgcccctgcaatggaagcaatccgtgtgcaagctcctttataaggacggggataaggagcgcctcgccaactggcggcctatcgccctggagcccgtgttacagcgggtgctcagtgcggtagtcgccagcagagtgacgaactgggcgagggcaaacgggttgatttccttggaagcccagaaaggcttccagccagctgatggtacctccgagcacaatttcgtcatggaggttgcaattcaagaggcaagacgcactaatgcacagcttgccatcagctggttagacatctccaacgcctttggcacagtgtcgcaccaattgttgttttcgttgttggagcgctatgggctggacccgacttttaccagttttatccagaatttgtataaagacgcgaccattgtagtcaaaggcgccaatggaacccacgttaccgcgcgctggtcagtcggagtacgccaaggtgacccttgcagtggtatcttgttttgtttgtttgttgagccactcttgcggtcagtcttaccatctttaccgtgtgaggcggaaacgactgcggttaacgtgttaggacagccgatcacagcgctggcttacgctgatgacatcgcgctgttcgccccatccatcggggttatgcaacaacagctgtgcaaaatccagggcatggccagcgccatgggctttcggttcaacccgaagaagtgcgcgtccctgtacttgaatcgtgcagtagtgaatgccgcaacattcacgataagcggggaggaaatacctgctctcgtacacggggacacttttcgctatcttggagtagccgctgggctgggtaaaccccagactcctttctcattactgcgtgagaacctccgagaagcggaacttatattccggtcaaagctggctccgtggcagaagatggatgcgtaccggacttacgtactgccacgtttgacatttcagcttatgattgctaaatttaacaacatcaagcaatcggccgggcagtatgaccgcgcaatattgaggctcgtgaagcgttgcttccagcttccggtggagacgtccaccgacttcattagagcccccagacagtgtggtggtctgggcgtgccatcattgcgtgagttgtacgcaaccgcaaaggtttcgcgggcactcaagatgctctggtctccctgtcgggtagtctcgagcctggcagccagtcagcttcagcgagttgcgtccgcgtactttgcgaagaggttgagagatgttgaggcggctgacctctctaccttcatgaacgccgcgcgatctacgccgctagatcggtcagggtatccgacttgcttgtggatggacgcacgcaagcagatgtcgtacctgacaaaggtagccggcgttgactgttacttcctcgttggcgaggctgggacctctttcttcatccggaatggcctcggtcagacggtctcagttctaagccccttgaggaagaacaaagttatgagcgttttagggggggcgatccaaactcgccatctggacgcctggctccaatgcaagcgccaaggtaagactgcgagctgcattgtgctcgaccggtcatcctcccgttttataacgaccggacggtacaccagctttgcagctatgcgctttgcgttgcccgctcgcctggatttgttaccttgccgggcgagatcctctatgcgttcgtaccagaactgtcggcggtgcggttacgaccgagagaccctgccgcacatccttcagcactgtcggcagttcagcgcccccgcttaccaggcccggcatgacgcagttcagggacgcctggaaacggtcatgcgtaggcggttccccaacctccgcgtaaaccgggctctaccggagattgggtcgaacaagcggcctgatctagtggtcgttgacgaggaaaagcggttagtgattctgcttgatatcgcaatcgtgtttgaaaacactgccgctgccttcgtcgatgcccggaccaggaagtgggcgcactatgaaaaggagatcctcgcctaccggctacgaggatactccgtgacgtacgacgccatcgtcgtcggtgctctggggacgtgggacccgaagaacgatgccatcctgaaaaggatcggtgtcgtctcccaaaggtacctacggctcatgaaggttctcgtggtgtccgagatgttggaacattcttcacggatctacagaaaacacctcggcctgcgagaccttctcccggacaccggcacgaaacggcgaccggttggcacgacggagacagacccacccggtggtgatctccgtcagaagaagcgcaataccatcagcgctagggcatcaggtgggaaatgcctggaacggcggttcacgtcacccgtcgggacgccctcgcagcgtggtgagctgcagtgccaaccgtgccctggccctagaagacccgccctcgctggaatagcgcccaacccgcctagtctccagcccagaaaaccacccccgcggcaacaccagaagccggttacgaagtctacagcgcattgatccgtcccgaaccaacggaaccacattgccgcatgacttcgatttcgcttttgctctttttgtatttaattttgctattaacaattcagtttgttaactgttttgtattcatttgaagatccaaataaaac

SEQ ID NO: 1073 - DNA, 4906 bp, Chelonia mydas
  source 1..4906: mol_type = unassigned DNA
ggcagaaactgcacsttctagaagactcactgcctatcctgaggaagactaccgctttggagatggattctactgccgctgcttcaaaagaaaatcttcatgctgcttcggaggctccaggacagastgagaagatgatcgctccctcgccgattccacagaaaccttcaactgccgctcggaccgctgctgctccacggagcgcccatcggggaacagcctctaagagaccctcagcgcttccaggacatcgcagatgagcagcatcgattggaaaagcagcgcctccctgaagaaaacccgtggagatgctgctgcagggawatcttgcacctcgaggacggcctcccaggacatcgcagccaggacaaacatcatctcgcctgctcttcaggasaaggatgccmsaagaacttmtcccacctcctcmactgcccaggatcctsatgctggtcgtcgtcctgctgtgctggaagmkaccccaactggcgagacctcagaaaccacccagmwggacckcaacatctcactagatgcctgcccagccgaacctctccatgcwactctcccagagcaacsagaaccatccagmgaatccgctgatatgactgaagccmatccaacagagggagaaggaaaggagaatgactgcatctatctccagtatcccctccctacggacacgctcctctkccccttccgctatccgagggttccagtacattggcagtctcagcamacacctcaagagaatccatascaagcggatcaccttccggtgtgccctctscgacctgcctttcgagacgcagatgaaatgtaagtctcatcaagtcacctgcaaaggacatctcgaactggaagagtccaactttaccagtctatgttgccgccaccccatctctgctccgaaagcagaaacaccacatgctccagctccggcttccgactccccaaacactccggctactgcatcccagccaactcccccagagccacagcacgaagaggtggtccaacatctatgaggaaagggcccgggcgcccaaggatactaccattgaaagagtaagtgctgcctcaaaaatccctaagctggaccctgccaagaggaggatcggcgctcccttgcagcttatgcaaggcaactccatctccagacagcttagtgcttcctcgcagtatgtccagcacaacgccgtcgtcagaagggtcagcgcccctccacacacgggtaacttcacgggatcctgtcgtcggaagctagcactacctcacaggccacccagcgagacccagccagcggagagctatctccactgctggaccacgcaacgggaccccaccctagcggaccagcacggcctccaagaccacccaacgggattgcccccagaaggctcacactgcatcaaagaccccagacagaactcatccacagaagggcagcgtcgctccggaaactcccaagcaagacgcatccctaaaagggccagtaccgctgcctctaaaactgtccttcctaaaaggaccagtgctgccctaaaatccgtaagggaagacactgccctcgttctggaagatccggccaaatggagttctcaacaccgggagggaaawaggcaacaggctaatcccacagcagttttccagcctgagcctgcggagattgagcagcagcccwcggtgagggccgccacaccatggcaagccgcttggatggaggagttggcgaggacagcctccttcgakgactttgacctccttgtagacagactcactaaagacctgtctgcagaaattgtatctgggaggaagggaactcaggagaacacaccaactgckcacagacagaaccaaaacaacatgagggaagccaggagaaggaacatcagtcgctgctatgacccagcagcagcatccaggatccagaagctctaccggtcaaaccgccctaaggctatgagagagatcctcgatgggccctcatcctactgcgcaatcccgtccgagagactattcttgtacttcaagggggtgtttgaccgtgtagctcagaacgacatgcagcgtccagagtgccttcakccttwaccccgggttgactatgcagaggaccwggaacaagactttacatcatgggaagtagaggccagacttacaaagaccaaaaacacagccccaggaaaagatggcattcgctacaacttcctgaaaaaacgagaccccggttgcctggtactaactgccattttcaacaaatgcaaacagttccgccgtactcccagctcctggaagaaatctatgatggtgctcgtctacaagaaaggcaagcaagacaaccccaacactcggagacccatctctctctgttccaccatgtacaaactgtatgccagctgccttgcggctaggatcacagactggtcggtgaacggaggagccatcagctccatccagaaaggcttcatgtcatgcaaaggctgctacgaacacaactttgtccttcagactgccatccacatggccaggagggcatggaggcaatgtgccatagcatggctcgacctggctaatgcttttggatcgatgccccaccagcacatttttgacatgctgcgagagttcgggatgcctgaaaactttctccaactggtccgggaactgtatgaaggctgcaccaccaccatctgctccatggaaggagagacacccgaaattcctatccgtagcggcgtgaagcaaggctgccccctgagccccatcgttttcaacttagccatggagccgctcattcgagcgatctccagcggtctaggcggtttcgatctgtatgacaacagagtgaatatcctggcctacgcagacgatctggtcctgatcgcagacaaccccgagagtctccaacaaatgcttgacatcaccagccaggctgccaactggatgggactccgcttcaatgccaggaagtgtgcatccctgcatatcgatggcagtagaagggattcggtccaggcgacgtcttttcagatccagggtgaacccatgatcttcctcgaggacgggcaagcgtaccaacatctcggcacgccgacgggtttccgcgtccagcagacacctgaggataccatcgcggagatcctacgagatgtggccaggatcgactcctccctactggcaccatggcagaagatcaacgccttgaacaccttcctgatcccccgtatctcattcgtcctgaggggatctgccatggtgaaggtacctctgaacaaggcagacaacaccatccggcagctggtgaagaagtggatgtttcttccccagagggccagcaatgaactggtgtacatctcgcacaggcagggcggtgccaacgtccctcgaatgggtgatctgtgcgacgttgccgtgatcactcatgccttccgccttctgacgtgcccggatgccatggtgaggaacatcgcggagagtgctctgcaggatgccgtcaagaagcgaatcgccaggaccccctccaaccaagatgttgccacctacctgagcggctcgctggaaggcgaatttggaagagacgggggagactttgcttcgctctggactcgtgcccgcaatgctacgcgacgactggagaagcgtatcggctgccactggacgtggtgcgaggaacgccaggagctgggagtcctggtgccacaggtgaagaacacagatcacactatcatcactccgagagctagaaccatgctggagaggaccctgaaggatgccatccgctgccaatacgtggaaaacctgaaacggaagccggaccagggcaaggcattcgaggtgacgtgcaagtgggatgccagcaaccacttcctccccgggggcagcttcacccgatttgccgactggaggttcatccacagggcccggctcaactgcgtcccgctgaacggagccgtccgccacgggaatcgggacaagcgatgcaggaagtgcggctatgccaacgagacgctaccccacgtcctgtgtagctgcaagccccattccagagcctggcagctgcgacacaacgccatccaagatcgcctggccagagccatcccgccacccgtggggaaggttgccgtaaactccgccatccccggaaccgacagccaactgcgaccggacatcgtcatcaccaacgaggaccggaagaagatcatcatggtggacgtcacagtgcccttcgagaacaggaccccagccttccacgatgcccgagctcgaaaggtggagaaatatgcccctctggccgaaaccttgagagctaagggttaccaggtccagacacacgcgctgatcgtcggagccttgggcgcatgggaccccagtaacgagcgagtgctgagagaatgcggaatcggtcaacgctacgctcggctgatgcggcaactcatggtgtcagatgccatcaggtggtcgagggacatctacatagaacacatcaccggacatcggcaataccaggagggatgagctggagtgccgatgagaagcgcagtcgggaaagtaactgaaatactttcctcatggattgtattttctaaatggacaacctacctaattctcaattactgagggacaatctccactcattgatatattttgctttccacaaccaaatctctgtacaacttttcatgagtgatgtacccgagtacttggattctaatatctaaactgtattgttaaatctattcacctaaatttgggttattgctgattatgtactctatgtatcatatgacttttaaaaacaaactttgtatttgtggataatctaagcactatacccagatgtacagacactcttttcccaacctatgtattatatttttttaacattagctttaataaaatttttaaa

SEQ ID NO: 1074 - DNA, 5390 bp, Phytophthora capsici
  source 1..5390: mol_type = unassigned DNA
  misc_difference 125: note = a, c, t, g, unknown or other
  misc_difference 574: note = a, c, t, g, unknown or other
  misc_difference 588: note = a, c, t, g, unknown or other
  misc_difference 611: note = a, c, t, g, unknown or other
accgcccaagtctccaccgcagctgcgactgctgctgctcatcgagccgcagtagtcgcagctgtacaagcaccacctcctaccggacgcgccgtcgtggagcaccacgcgcgcgctgagccgcntcaagaccaagaattccaggctcgcgcgcgcgtggcgcttcaagatggcgacgcgaccagcaggagtggccgctctactgacggcggagacgaggccaagaccgaggacagcgacgcggacgcagccaagcgccaagccgctcaagcagcaccgagaccccatacccmggacaccgcgccgtacgacggccacagggactcggtgctggctgtgtacgcacacaacgcacctgcattcacctgcgcgttgtgtgtgtacacagcacgcaacttcgccgagctgaccaagcatcgccatgcagcgcatcgtcacacccgcttcgtggatcacttccacagcgggtgcacgtgtggcatcggcttccagtcgcgcgcggcagctacgcgacacgctcaagcctgtgcagacagcacacacgccaccgtagctgcctcgcgcgacccggcmnccastgcssccsgngccggmagcgasgaggaggaccncgcaccccccggtcctctsstcgcggcagcatctgcagctgcagcagccgcatcaagcgccactccagctgcagatactgccaccacgcagagcgccgtgcccatcgctactcctgggccccagtacgccccccacgtgctggagccacctccagagctccgagtttccggcaaacgccgmcgcctcaacacgccgatcgacctgcagccgctggacgtggacgcgctgatgcaggacatggaggaggagctgctcctggacgtggagatggagacggagacgacggaaccgcagacctcgacggccamggacgccaccaccaccacggacaggccaacacgatggggcccccaccccagagcagtggcggctgcagccatmgcgcagctggtgaccggcgagscagcagmtccagctctgccttcgagacaggaccgccgcccagcaccacgatcccacgcacccacccggtctcgatggggaccgcgccatcaagctgtcggtgccgcagccatcgcgtcgctagctacaggactaccggcctctgcggcacccgtgtctcgcgcaaccaagcacggggaaggacgacgccgtctccagacacgatggggacctcgggtgagcatcccacgagccgcacgccgtccaggatcgaggtggggacctccacgcgcggcaggggcctctggccaacttcctgccagcgcctccggggccactggccaacttccggagcatgtggaggccatcaccacgacaccacgtgtggcatcggacgctgatgaaggaccgacaccgccggatccgtggatactccgcttcgacggcgcatgcaggcgtaaccccggaccgggcggtgcaggtgctgcattgtttaagccgagtggcgccgtggtgtggacgtgctcccactacatgccaagcagcaacgaaaccaacaacaccgccgagtacacggcactgctgctgggcgtacagagcgcggtccaccacggtgccactcgcctagacatcgagggcgacagcagcctggtgattgcccaggtcaagggcacattcgcgtgcaggaacgcgaaactccggcagctccgcaaccgcgtccggcatgcgctccgctccgtggagaagtacaccctccgccacatcgaccgcaaggccaacgcccacgcagaccgtctggccaaccgcgcgctggaccggcggtcgagcagcagcgagtgcgagccacacggctcgtgcatggagcgatgctgtggcaccgacacgacaccagcggtgcaaggaccgacaccgcaagcagcagcagcagtgccagtgcaggtgtggccccagtggcagcggcagacgatggtagcgtggacgacgagccatggaggtcgatgccgagattgcagcacgagatgcgggcgaagccttcccagtcttgcccatcggcccaggctcagccccaggcggcaacctcggcttcgactgcgccaactcagcgacgaggaacgcgacrmagcagcggacgccctccaggagcttagcgacgtcatggccagcaagatcgttgacgcagacagttgggacaccggcgaaggctacatcagctccataccggagcgcatccgagaggtgctgcagccgtacaccacgcgaccaccacggcctgggcaccagcagcagcaacggcgacggccaccacgtgtgacacgcaaccagcgcgaacaccggctagacgaagcgctggacgacatgcaagccacgcagcaagcagcaccgcgggaccaacgggcgatacatcgagcgcggcgtcgcgtcgggcgtgtccgggcatcgatggccaagcaagagctacggcaggcgttcgccaaggacgagtccaagtgtgtgtccaagatattggccggtgcctcggcggagacagcggcggaagagcacgtcgacgagtgcccgattgacgccgccacgctgcatgcccacttcacaggcaccaatgcgccacggacggacttcgactacgacgctgcatgcggtcaagaattccgaggagcgctggacagcatgcagccgccgaccgttgcgaccgacgcgttcgaggaagagttgacgatcgacgaggtggaggaccagcttacacgcgcggccaagacctccagcccgggacatgacggcatcggctacgacatctacagtcgcttcgccgcgcagctcgtgccactgctccacgccgcgtaccagttctgctggctgcatcggcgcgtgccagccctgtggaagttgggcatcgtccgcctcatccacaagaagggcgacccgatgcagccaacgaactggcgaccgatctgtctgcagcccgcgatttacaagatctacagcggactgctggcgcgtcggctgtcgcgctggatggagcagaaccagcgactccccatggcacagaaggggttccgagcgttcaatggttgccacgaacacaatttcgtggcaaccacgctcctggatcagacgcgccggtcgcaccgcaggctgtaccaagtctggtacgacctgcggaacgcgttcgggtcactgccgcagcagctcatgtggagcgtgctccgccacctcggcgtcgacgcaagcttcatcgcccggtgcaagaacatctaccaagactcggctttcgtggtggcgaacgcggtggacggcgcgacggatcctgtccgccaggaggtgggcgtgtaccaaggttgtcccctgagccccctcctcttcatctcggcgcttgtgccgctcattcgccgcctcgagaagctcgacggcgtaggggtgccgttggccgagggtgtacgaccgtgtgccaccgcctacgccgacgacatcaaggtgttcagtgacagcgccgctggcatccgtaaatgccacgacgctgtcactcgtttcctcgagtggacaggcctgcgggcaaaccccggcaagtgtgccagcctagcggtgacgacaaacgcccgcggcaacccggtccgcgacgacggcgtgcacctagagctgcaaggcgaagtcatcgcccccctcagtctccacgatagctatcgctacctgggtgtgggcgatggcttcgaccatgtgcgccaccgcctccagcttgaacccaagctccaacagatcaagcgagaggcggtggcgctgatgcagtccggactggcggggtggcaggtggtgaaggcgctcaagaccttcgtgtaccccaaggtcgagtacgcgctgcgccacctacgaccactccagtcccagctccaaggcttcgaccgcgccgtcgtccgtggcctgcgccacctactgcgcctcccccagtccgccaccaccgagttcttctacacaccaacgtctggaggtgggctggggctgcagtccctcgtggagatgcatcaggcgctgcaggtggcgcatgcctggcagatgctccattccaaggacgcggccgtcgtggccgttgcgaaggagcaggtctgccaggtagcacgcaagcgctaccgcctgcaggaagaacattggcgcgggcgtggcgacgagctcgtgaggctcttcctcaactccgagctcgccgcctcgcccttcgctgactgcctccgccgcaacggcgacatcggatccctctggacggacgtgcagcgcacgctccgcctccatcacctcagcctgacggctcaagacgacagagatggccaagacccgcttgcccttcgcgtgccgcaccacaccaagtggctcgaccacaagactgtgctgcggcacgtgaagttgcacatgaagatccgccaccagacccgatggaaggggctagtggaccagggcaagacggtacgcgtgcacggtggcctcggtgcgaagttcgtgtcgaccggggcggggctgtcggacgacgcataccggttcggcgtgaaggcccgcctcaaccaggtcgacacgaacgccgtgctcaagcgcaagcggctgcggtccagcaagacctgcagagacccgacctgctcctcggccgagacgctggctcatgctctcaatcactgcgcgtccaacatggacgccatccgccagcgtcatgacgacgccttagagcagatcgggtccaagatccgcggcgcgcttgagcgagccaagtcgaccacagagctgcgcctgaaccagacggtgcctgagtatacaggcgcagctctgcgacccgacatcgtcctgcggaacgtggccgccaagaagatggtgatcgccgacttggcagtcacgttcgaggaccacgcggccggcgctcgtcactcctcgctgcagctcagccacgatcacaagacactcaagtaccagccaatcgtggcagagctgcgggtgcaggggtggcaggtgcagaccgcggcgattgtgtacgggtcgctgggctcggtgcagcccagcaacttcaagacgtacaccgagaagttgaagttgcacaagcgcgaggctcgacagctggatcttcaactgtcgagccactgcattcaagccagccaccgcatctggggctggcattgccggcgccatcgcgaaggacaacgaagcggcaatacctcgcgagcatcgcgtgggtctggggggaccccgcggcgcacatcgcaggtaagggcacggcgataagctggtcatttgaccgacagggcactacccaggtagggaaccgcccttcagaaacccaggaagacacaaacaccctccctttagtgacatacatattttaggctacatttcagttacggagaggttactaactggtaaataaaaagcacttt

SEQ ID NO: 1075 - DNA, 6828 bp, Phytophthora infestans
  source 1..6828: mol_type = unassigned DNA
gctcggcctcgcggctgccttcccaggcgccgccgacttcgcgctctggcgcggcccacacgccgccgccgagcctccaagcgcgcccgttggcttccgcagacgcagggctcgcggcgacggccctcgccagcccccaagaccccccctacgatgtggcaccacccggcagggcggccggcaggctgcccgactcggtatcgccgggtgctacactctcagccgccacagctcgggccttggcggtccgccattggcccttggagctcgacagcgacagcagcgacgacgaggacgctcaagacccccacgccgccgccccaggaccccccgcagacgtcgcgagtgtgcttgccccacccggcaaggcaggcagcatgctcgccgacccagcagcgctggcagccggtctggctcgcgctccgccgcccccatcggcaccccaggacccaagccccgccttccctgctggccccgccggccagaaccctcgcgccgccgccccagcccgtgttgaagtccacacagtcgtggcaccacccggcagggcgggcggcatgctgcccgacccggggttggttgactcaagcccagcagcggctaccgcagctactccagctccggtagctgctactgctacaactgctcgcgctgctgctcgcgtcgccgtggagcaccacgcgcacgctgagccgaaccaagaacatctaccgatggctcgcgtgctcgtggagcccatgcaggtcgacgagtgcagcagctgcgaccgcagcactttgacagccgacgacgggagcggtgacgacgttgcagccccaagctccatgctcagcaacgacgtcgccgcccccatggacgttgactccggcaccagttgccctccaacgttgcagcagccgctccagcgaccgcgtgcgctgcacgtaggcagcaagcgccgccgactcgacgcagatgacggtgaagaagctcaccagctgcaagaagaggaggaggctggcattcatgccccagcgctcaggctatccgcggccagcgctcaaccggcctccgtcctcgccgtgtacacgcacaacgcgtcgcggttcgactgcacgctgtgcgcgtacacggccggcagcttcgcgtcacttctgacgcacaggaactctcggcaccgccgcaccgcattcctcgaccgattctcggcgggttgcgcgtgtggcgtgccattcgcctcgaggctggctgcagcaagacacgcgcaagcgtgcgccagcctctcgagcgcaccatcggccgaggcttcgtcggcagcaggaacatcaagccccactgccgacggagccgactccaccgtctcagccgtggctcacgctgagcccggcctgccccaccacaacgacacggagctcacagcgtcccccccgctggtgagctcctccgatgttgaagtgcaggcaacaaagaccgaagccaccgacaaccgctggggcgccccgcttccgcgcgtgctggtcgcgtctcgaatcgccgggcgcctcgctcaggtgccacccccacgctggggccccccgctgccgcgcaccaccatcgcagcccgcattgcgacgaggctcgcagccacgcctgccccccgctgggacccaccgctgccacgaagcctggttgtgtcacgcatcgccgcccgcctgctacccgcgctaccagacgcgcctgcatgcgaggaagaggccaaggacagcgacacgatggactgggcgccaacttggacaaacgaggagaccaaggaaagcgagccacatgacgaagcgccagggcaggtcgacgaggagaccatcgacgacgccgacggcgagtggcttttgcgcttcgacggtgcttgccgtgcaaacccaggcccaggcggcgccggcgcagctctcttcaagcccagcggccccgtagtgtggacttgttcccactacgacccgagcaccacggcaacgaacaacacagcagagtacactgcgttgctgctcggggccagggccgccgccgaccacggcgtcacgaagctgcgcatcgagggcgacagcacgctggtcatccagcaagtgcggggcatcttcgcgacgagaagcacgcggctccgagcactgcgcaacaaggtcaagctcgagctcgcgcgcgtggggagcttctcgctccaccacatcgaccggcaggcgaacggtcacgccgaccgccttgccaacgccggcctcgaccgacgccgcaccaagctcgagtgcagtgtgcaccccgatggcaggggctgcaccaacacctccgtggcgaccgcagcgcctactgctcctgcagcgcccttgccctcagcccggcctcctgcatctacggccgctccgtctcctgatgacgaccacagcgaccaaggcgacatcgacgacggcgaggtgtacgccgcaatgtgcatcagccccgatgctgtgccgcaccgccgaccgcgcctccgcctacggcgcttgacggacgaagagtccgaggaggctggcaacgtcgtggagaggttggcagcgtcgctggcggcgaagattgcagatgcgccagactgggagacggcggagggctacatcacggccctaccgtacgccctctacgacaagctgcagccgtactcccagtcccagcaccaacctccacgtcaacagcagcagcagcagcggcaacgcccacggcagcagcagcaaacacggcagcgtcgacagcggagatgcaagcgcggcggtggcagccaacacaggcagcggaagacgcgccgccgacggcccccacgggtgacacgccaccaccgcgagcaccggatcgatgaagccctcgacgacctccacgcgctcgagagcaggcgccctcaggacaggacggccatcagcaaggccaggcgtcgagtcggtcgcatccgctccgcccttgaccagcaccaattgcgccaccgcttcgacaccgacgagaaggcctgcgtggacggcatcctggccgccgcgcgcgacaaggacagggcggcatcagtgacgacaacagcgcaaacagcggctccgcctcattctgcaccagcttcagctccttcgtcggcggtggacgacggaatctgcccgattccgggagacttgctccatgccttcttcacagacgtgaacacgccgcgcacggagttcgacgccgactcgcccatcggagcccgctttcgggaggcgcttgctcagctgcccgctgccatcgctgccacggagctactcatggagccgccgtcgccggacgaggttgaggaccagttgcaacgtgtacggggtacgtccagccccggcttggacggagtggggtacgacgtctacaagaccttcacacagcaactcctaccggccctgcacgccgctttctccaggtgttggactgatcagcgcgtcccacagagctggaagctcggagtcgtgcggctcctgttcaagaaaggagatcggcaggaccccgccaactggaggccgatctgcctccagcaagccgtctacaagctgtacgccggtatcctggcccaccggttcacacgctggctcgacgccaacacccggcacgctgacgcacagaagggattccgcgcggttaacggctgcggggaacacaatttcctcgcagccacgctgacggacaacgcccgccgccgacgccgcgagctgcacgtggtctggtacgacatcaagaacgcgttcggcagtgtgccccacgaactgctgtgggaggtgctgaggcgcatgggagtgccggcgcagttcatcgcgtgctgccaagggatctacgacgcggcagctttcacggtcgggaacgcagcagacggcacgacggccccaattcagctgcgcttgggcgtgtttcagggatgtcccttgagcccccacctcttcacggcggtgatcagcccactcctccacgcactcaagcggctccctggcacgggggtacagctctcagccgtcgaccggccaggtgcgtcagcatatgccgacgacctcaaggtcttcagtgacaccaaggatggcatcacgcggcagcaccagctcgtcaccgacttcctgcgctggacaggcatggtggcaaacccgtccaagtgcagcaccatgtctgtccagagggacaaccgcggcgttttgaagaccgccaacctcacgctccagctggacggcgcccaaatcccagcactcgggatgaccgaggcgtacgcgtacctgggcataggcgacggattcgaccacgtacgccgccgcgtcgagttggcccccaagctccgcgaactgaaggcagacacgacggcgctgatgcagtcggggctggcgccgtggcaagttgtgaaggccctcaaggtttacatctacccacgcgtggaatatgccctccgccacctccgaccgtttcagcagcagctccaaggctttgaccgacacctcgcgcgcgggctgcgtcaccttctccgcctgccaacatcagccaccaccgagttcctgtatgcaccaacgtcgcgaggaggtttggggctgctaccgcttacagaggttcacggtgcccttcagattgcgcacgcctggcagaccctgcactcgccggaccccgccatccgccgcattgcccgcgtgcagcttcgccaagtcgccgacgcccggcaccgcttggacgccgagcactggaaggagcggggggaggagctgtgcgagcggctgctaaactcgcagctcgggacatcggcccacgcgcctcccaaacgacgcaattgcgacatcggctcgctgtgggtcgatgtccagcgccacctccgctctctcggcctacagctacagacagcccccgcggacacgcacactggcgcaccagctcagcctctccagcttcgcgtgccgcaccacgacaagtggctgacgcacaaggacgtgctgcggcacgtgaagctgcacatcaagaataaccactggcaccgctggacatccatgcgggaccaagggaagacggcccgcgcccacggcggtgaaggcagcggcttccttacgcagccgcgaggcatgtgggaagccgactaccggttcgcggtggcgggtcgtcttaaccaagtggacacgtacagcgtactgaagcgccggcgcctgcgctcgcacgacagatgccgccagccaggatgccatcgtgccgaaacactggctcacgtgctaaaccactgtcccggcacgatggacgcggtccgagggcggcacgacggagcgctcaagcgcatcgagcgtgagctccacgcgtcggccacggaccgccgggaccgcgtcgagctccgagtgaaccagaccgtgccgtcactcgccggccccgcgttacggcccgatctccagctctacaaccacaccaagaagacggtggcggtggtcgacctggccgtggcgtttgaggagcaggcgagtgacgacgcgagcagctcggcgctgtcccttatcgccagccacaagcgagccaagtacgaccgcatcaagcgacacctcgagcgccaaggatggaaggtacacctctcggcgctcgtgtacgggtcgcttggggcggtcgctagtggcaactaccaggtgtacaccacacacctggggctactcaagcgcgatgcaaagcggctggaccggcagctgtctgtcgaatgcatccagtccagccgccgcatctggaatctacactgcagccagcaccggactcgccaacaccaggcgaggcccagccaaggaccaagaggcagccgggcgacggagaccggggggactccgtcccagacaagccgccgctaggcggaaaccaggcccaagacggccgacagggccccacccaggtagggaaccgccctagaaacccatttcggtggtcgactcgaaggccttacctattttttccttagacattcaattaggtagcgaccaaattacaaatttggtaacgagtaagccaaatggtaatacacaaaacttttctgttctaatcagtgtgaaaactggttttcgccttttggcggactttttcactcgcatttttgggcaatcgtctgcggctagcttgctagcggcggacgagcggtctccgggggcgttcacctttcccccgcgaggccaactacaccgatcttctctacacttttctaattcgcctccgtcttcggtcttcggctgtcggatttttttctttttgaccaatcagagcgcgccatgcgactcttctggccaatcagagaccgggccctgtcctcggacagcgaggcctccacggccagccaatcaagtctcggcagcgacgcgtctttctatagcgcagctgacgaggccgatctggcggcccccgattggtccgactttcggccaatcagcgacgacgagggggcaggggtttacacttttgcccccgtttcgacttcaacttcaggccaaaatggcgatttcgaccctccacgcgccgtgccactgctcggcaccggcggcgattcagcgggtgcaacttcgggcacgtgtgcaacacatgcagcgcccattgcacgccaagcggcatcgcgggacgacgcctcggccgctcaagcgcagccccgcccttccagcacgacctcgcgccgtttggcggatcgccatcaagacgtgcgagagccaggcggggtcgggcaaaatatacttactctaagtatgcccgaatccctgccctctcaggctgaacgcggccccatacttgatctaagtatgggagggatccctggcctctcaggctgtacgcgagacccgtacggccgaatcccctggcctctcagcctgtacgcggggc

SEQ ID NO: 1076 - DNA, 5331 bp, Phytophthora ramorum
  source 1..5331: mol_type = unassigned DNA
tcaagccccgccgccaagcccagctgcggctgttgccgcccctccagcagcagcagtcgcagctgaacctacagcccctcctgctgatcgcgccgccgtggagccccgcgcgcgcgccgagccgccccaagaacaagcacccccagctagcgcgcgcgtggagcccatgtcgggcgacgtggtcagcagcgacggcagcagcaggacgacggacgcgagcggcgacggcgacgacggcgcaggcagcagcgatgcagcaggcgacgtcggcgtcgtcgccatggacgttgaccaaggtgcccgccgacagcagccgccatggcagcgcgtcggcggcaagcgtcgacgtctcaacgacgtcgacgacgaagacacccgcgagctggccgagctcctgctcgaggaggaggacgaggctggggaccacgctccagcgcctaggctatccgcggccagcgctcgcccggcctccgtcctctccgtgtacgcgcacaatgcgcagcgcttccagtgcacgctgtgcacgtacacggccgccagcttcgcgtcgctcaagcgacaccgggactcccggcaccgccgcaccgccttcctcgaccggttctcggcgggatgtgcgtgcggtgcgcccttcgcgtcgaggctggctgctgcgaaccacgcacacgcgtgcgccagcctcaaccgcaccttatcggtagcggctacgccggcagcaggggaactgagccccactgctggtgcagccaacgccaccgtcaaggcggccaccgtcacgcccgactccccccgccaagaccccccggagctcgcagcgtcccccccgctagcgagctcccccgacgttgctgtgcaggccgccgacatgcaggccccgactcgttgggacccgcccctcccccgcacgctggtggcgacacgggtcgcctcccgcctcaccgacctgacaccgccgcggtggggaccgccgctgcctcgagccacggtggtgtctcgcatcgcggcgagactcgaggccgcaccaacgccccgttggggccctccacttccacgcgtcgtggttgcgtccmggatcgccgaacgcttagctccgcccgagctggcagctgacgacgagaccaaggacggcgaggaagaccagagctttacggaacctgtggctgccgcccggtcmgakggcggcgaggacgcgaacggcgagtggctgcttcgcttcgacggcgcctgccgagccaacccaggccccggcggtgcgggcgcagcgctgttcaagcccagcggcccggtggtgtggacctgctcccactatatgccgagcagcagcgagaccaacaacacggccgagtacacggctctgctgctcggcatgcgggctgcggcggaccatggcgctacgcgcgtgcacgtcgaaggtgacagcaccctggtgatccagcaagtgcggggcatcttcgctacccgtagcacccggctccgtggactgcgcaagagcgtgaaggcggagatggcgcggatggagcatgtcacgctccaccacatcgaccgccaagccaacggccatgccgaccgcctcgccaacgccgccctcgaccgccgcaagaccaagctggagtgcggactccaccctgacggccaaggctgctccagcaccgccgcgacgacggcggtcccctctgtggtgccggaccggcctccctcgtcaaccgctgccgcgccaacgccaagcgccgaacccgacgagaccgagcagggcgacatcgacgacggcgaggtctacgccgccatgtgcattggcccggactccataccggagcgccgaccacgcctccgcctacggcagctgtccgagaccgaggaggaggaggcgggtgccattgtggagaggctggcggcaacgttggcgggcaagatcacggacgcgagtgactgggcgacggcggagggctacatcactgccctcccctacactctatacgacaaactgcagccgttcgcccagcaccgccaccagcctcgcccacagcaccggcagcaaccccagcgcgacccacccctcggcacccacgacggggaccacggccagccgagcaccagccgcagccgtcgccgtcgccgccgcgccaaggatcgcttacgccgacgcccaccgcgtattacccgccaccaccgtgagcaccgcctcgacgaggctctggacgacctgcgggcggtggagcacgccagtccccacgaccggccggccgtcgctcgggcccggcggcgcgttggccgcgtcaactccgccattgcccagcaacagctgcgacacaagtttgacaaggacgagaaggcgtgcgtggatggaatcttggccgcggcccgagcttctcgcgggttagcaaccccatcggcctcagcctcgaggcatccaccgccggtaccctccaccgctgctgatgacggctcctgccccatccccagcgatgagctccacgccttcttcacggccgtgaacacgccggcgggcaccttcgagcccatggcaccagtgggtgccccgttccgctccgccgtcgcccacctccccgccgcgacatcgcagcctgagttgctctcggacgcgccgaccacggacgacatcgaggaccaactgcagcgtgcccgtggcagctccagccctggcctggacggcgtggggtacgacatttacaaggcgttcgcggcccagctcctgccggccctgcacgcagcattcgcgtgctgctggcgccacaagcaagtcccgcagagctggaaggtgggggtggtgcgcctcctgttcaagaagggggagcgaaccgagccggcgaactggcgcccgatctgcctgcagcaggcaatctacaagctgtacgccggggtgctagctcgccgactcacccgctggctggacgccaacggccgccacgcagacacgcagaagggattccgggcgatgaacggctgcggggaacacaatttcctcgcagccacgctggtcgaccaggcccgccgcaagcgacgagagctccacgtcgtgtggtacgacttcgccaacgccttcggcagcgtgccacatgacctgctgtgggaggcgctcgagcggcagggcgtccccagccccttcattgcttgctgccggggcctctacgcggatgccgtcttcacagtcggcaacgcagcggacggcaccacggcaccgatcgcgctacgggtgggggtcttccagggatgtccgctgagcccccacctcttcacggccgcgatcgccccgctgctccacgcgctcaagcgcttaccagacacgggcgtacagctgtctcgtgtcgactgcctcggtgcctccgcgtacgcggacgacctcaagatattcagcggcaccgagggcgggaccaagagacagcacgcgctcgtggcggacttcctgcgctggaccggcatgcgcgcgaatccggcgaagtgctgcaccatgtcggtccagcgcgacacacgtggagtgctcaaggcctgcaacctcggactgcagctggatggcgccccgatccccgcgctgaccatgagcgcctcgtacgcctacctggggatcggggatggcttcgaccatgtgcgccgccgcatcgagctcgcgcccaaactccaggagctcaagcacgatgcgacggcgctgctgcagtccggactggccccatggcaggtagtgaaggcggtgaaggtgtacctctaccctcgggtggagtacgcccttcgccaccttcgccccttccaccagcagctggagggcttcgacagacacctcgtgcgcggcctccgccacctcctccgcctgcccgccaacgccacgacggcattcttctacgcgccggtgtcgcgcggcgggctgggcctgctgcccctgacggagctgcacgcggcgctacaagtcgcgcacggatggcagatgctgaactcgaaggaccctgccatccgacgcatcgcgcgcgtgcagctccggcaaatcgccgacgcgcgccaccggatcgacgctcaagcgtggcaagaccgggaggaagagctggcgcagctcctcctgaactcgcagctcggggcgtccaccggcgcacccccgaagcgccgcaacggcgacatcggctcgctctgggtggacgtccagcgccacctccgccatctcagcctcaagctggagaccgcaccggcgtgtgcggagaccggcaccgccgcggccatgctgcagcttcgcgtgccgcaccacgacaagtggctagaccacaagactgtgctgcggcacgtgaagctgcactacaagaacaagcactgggccaggtgggcggccatgmgsgaccaaggcaagacggcacgcacgcatgggggcgcggggagcggcttcctcacccggccacgaggcatgtgggaagccgactaccgcttcgcggtggccgcccgcctgaaccagctcgacacgcacagcgtsctgaagcgccggcgcctccggsmscacgaccgctgtcgacagccgggctgcacccagggsggagacgctggcgcacgtgctcaaccactgcgccggcaccatggacgcggtccgcggccgccacgacgacgccctcaagcacatcgagcgcgcgctgcacgcgtcgtcgccgggcggccaggaccgcgtcgagctccgggtcaaccagacggtgccgtcgctcgccggccccgcgctacggcccgacctccagctgtacaaccacaccaagaagacggtggcggtggtcgacctggccgtggcgttcgaggagcaggcgagcgacgacccggagagctcggcgctggcacgcatcgccgcacacaagcgcgcgaagtatgccggcgtcaagcgacacctcgagcgccaagggtggaaggtccacctctcggcgctcgtgtacggctcgctcggcgcggtgccggccggcaaccacaaggtgcttactgagcaccttgggttgctcaagcgtgatgcgaagcggctggaccggcagctctcggtggcgtgcatccagtccagccgccgcatctggaacctgcactgcagccagcaccgcgcgcgccagcaccaagcaccagggggaagtcgggcggcggagaccggggggactccgccgcgcaccggccgccgctagacggcacacaggcccacagcggccgacagggccacacccaggtagggaaccgccctcaaaccccgccggtacattatggtccgacacctatgaggtgcaacctgtacacaagttacacaccacatagcgactaccaggtatttactacctggaagccaaggattaaccggtcggtaatacacataacttt

SEQ ID NO: 1077 - DNA, 5919 bp, Pythium ultimum
  source 1..5919: mol_type = unassigned DNA
tgactggtgtttgatcacgatcaatgaggtgattaacatgagccggagcaggccccttacacgctggtgctgtaatggttcaggaatgctcttatgagtaactccacagtataatttttgttagcgggggtgagcgcgtgcgccgcccccacctttctcttttcgtttgtatttggttcctctggagcgacttccgtggcttttgtcgcgcgctatcgcgcccggcatgaggatcgtcgctcctgacgccatgtgcgccagtatatcggagccccgtgctccgcttgggtgtgtgttccgccacgacgccacgcgatttgcgtgcacggcatgcgctggcgacttccgctcagtgcgcgaactcgcggtgcatcgtcgacgtgcgcaccggtctctggccttccaggactggtatgagtcgtcgtgcgcgtgcagagcgctcttcaccgcccgtctcgacgcgttcgttcattcgagccgttgcgaccacaatgcgaaccaatcagcgaacgccgtcccctcgtccgccgcctcgacaacgagagcggacgcggatgcgacggccccccctcccgctatctctcttccgcggacgggcttcccccgcccctgtcctagttgcgccgctctccttctggatgcggcaacttggacgacccacgtgcacgcgtgcgctgccgccagtgcgacggcgttgatccagcgtcatctacacgccgttcctcccgtatcgacagcaaccgatctcaacggcgatgatagccaacctccagacccgcgtgccaacatccaacagcttccagccatccattcgacaacgacaacgacaacgacaacgacgacgacccgctgctcgacgacgtgctcatggactacgacgactcggagtttttcgacgccatctgcattccagacgaagacgctgacgtgctcgacgatggtgacgaaggtgacgaaggtggtaacgacgacgagtcgtccgagccactgcctctagcgatcacgaacgctccaagcgctcccttgcacgcgaccatgctctgcggcacagttacacagccatggctcctgcgcttcgacggcgcgtgccgacgcaacccaggacccgccggcgccggcgccacgctcacgcggcccaatggtatcatcctatggacgcactacaggtatatcccggacaagacggcgaccaacaacgttgccgagtacgaagcgctgcttgacgggctgcgctgcgcggcgcaccacggcgtcaaacatctgcgtattgaaggtgactccaacctcgtcatcgagcaagtcaaaggcatcttcgcgtgctccacatcgctgcgcccgcgccgcgaccaagtccgcgagatcctgcgccacttcgagacctacagcttccgccacatcgaccgcgcacttaatcgacaagccgaccgcctggccaaccaggcactcgatctcctcaagacggtctccgtgtgcgcgctctctcaaactcgcgtccaagacgataccggtgccgcacatgggtgctggcactggacgccgccagatgcgtcgccaaccgacgatgcatccacgtcgatactcacgcaggacgttccagtccccatggatatcgatgattacgaccccgacgagcccatgaatgcggccgatgatccagtcagcattaatgctgaacgagaaggtggtactgtctacccagtgcttcgcctcggtcccaacgtcgtccccgaacgacaaaagaggttgcaaatcccgtggctcccgccgcgtgagatgcaaaaactcgaaaagaagatcgaagtgctgggggagacttttgcgtcgcgcattcgtgacgcgcccgattggttctctgcagaaggctacatcacggctctaacgtccgagcttgcaacgctcattcgccaatcaacggcggcgacgacgggaccgaatgcagcacgaccctgcgagcgcaccatcagcaaggaaaagcggcgcgcgcgaagaacgacaccgttacaacgcgcgctcgcggaggcaaagcacgagctccagatcattcagcctgatgcctcgcgcaagagcgtgaggaaggctgcacgacgagtcaaacggatctcccaagcgcagcagcgccacgacctgcgtcgcctcttctcgaccaacgagcgtcgttgtgtcgagaaaatccttcgtgatcccccagtggggccatcgagtaccagctccagcttgccagccaccgacgatgaccgctgtaccattgacccagccgacctgttcgcctacttccagacgcaagccacggccccaacgaacttcgactttgacgacgaaggcggcgaactgttccgctcggtgctcgacgaactgccgcgcgccgaccaagaggttcaccttcttgaggacgagatcactcgggacgagatcgaagaccagctctcgcgcatctcgaaatcgacggcaccgggactcgacggcatcacgaacgctgtgtacgtgcgcttcaagctacagctgcttgatgcgctacaagctgcattcaatgcatgttggcgatacaatcgtgttcccagcatgtggaaggcggcgtttgtgcgtctgatctacaaaaagggcaatcgcgctgtgccaagcaattggcggccgatctgcctacagcagacagtgtacaaactatacacagccatcctcgcctcgcgactgcagagatggatggacgcgaacgcgcggttcacgatgtcgcaaaaaggatttagagcgtttaacggttgccacgaacacaattttgtggctacctgtctacacgaccaaacacgacgccttcgaaagaagcttgcgatcgtgtggtatgatctccggaacgcattcggctcgctcccgcatgagtatttgtggcgagtactggcgcgccttggcatgccaccgcagtttgtcgcaagagtgaggcagctgtacgcggatgcaagcttcaccgtggaatcccgtgacgggacgacagaccccgtccagctggagcgtggcgtatatcaagggtgtcctctgagtccatacttgtttatcgccgcactcattccgctggtgcgcgcactccacaagctcaaagaccagcacggcatcgtgctggctcccggcgtcaccgactgcgtctcggcttatgccgacgacatcaagattttcgctcgatcgggaaccggcgccaaagccctccacgagatcgtggtgcgatttctgtcctggacgaacatggcagcgaacccggccaagtgcgcgctgatggtgaccgatggcgctcgtggcggtgacgacaccgatgcgagcatgacgctatctatcgaaggtgagacgatcccacgcctcaccggcaaagaaggctacgtgtatctcggagtggaagatgggctcgcgcatgagcgcagagcaacgtgcctgcgcgactcgctcaaggcagcgagcgcggatgtcgtccgcctgcttcgcagcgacctcgcaccttggcaaatcgtgcgtgcgatcaagtcgcacgtgctctcgcgtttcgattatgtactccgacacttgcgcccgttccttagtctctttgacggcttcgacaagatgctggtgcgcggaatcaagaggctgtgccagctgccgcaaacagccacgtccgagtttttgttctcgcccacctcggcgggtggcctcggcttcctgccactgaaggagctttttgcggcgctgcagattgtgcacgcacttcaaatgctgcactcgaaggacgccaacgtccgtgccattgcacggcaccaagcgctgcaagtggtgcgtaagcgctacgcgctgcagtctgaccattggagcgaccgcgaagaggaacttctcgaagagttctttaacggcacgctggagcgctcgcccttcgccctcgcaaagaaagtgtcaggggacatcgcgtcactctggacggatgtacgagtgaatctcaccaagtacggactcaaattcggcgaggcgcacggacggcgactgcagccgctcgtcagtcacactgacaagcagcttgcacctcaacaatgggctagtgcaatcaagacgcacatgcgcctgcgccacctcaagcgatggaccaccctggtcgaccagggtaagacagcccggatgcatgagcgcatcggaagtgcgtttctgacaaggccgtctggagtgtacgacgccagctatgcgttcgcggttcgagcaagactaaaccaagtcgatacgcgcagcgcattgaagcgcaagcgcatcgtgaacaatagccgctgccgtgtgagtggatgcagcgagctggaaacgctcgcccacgtactgaatcactgccgattcgggtcagactcgatacgagcacgacacgcagagacactcttgctgatcaagacgaccatggaacgtgagctcacgcggccagggcggcagcaccagcgcctcctggtcgacgcgacagtacccgaagctcgtgatcccgtaccaagtaatgacgctgctgagagcaacattggcgcaatggcacccagcatctcccacttgcgccccgacattcaactctacgacaacaagacaatggaagccgtgatcatcgacctcgcggttgcgttcgaagaccagtcaacggacgacgccgcatccagttccagtttcgcgcgcgtcaagggtgtgaagacaaagaaatatgaggtaatcaagcaatttctggaatacaaaggctacactgtgcatgtagcagcgctagtctatggttcactaggctccgttgacaccggcaactttgccgtgtatacggaacgtctcggtctccgcaagggcgcagtgcggcgactggagtgctcgctctcggcgcgccacatcaacttcgcgcaccgtatgtggcgacgccacgcgatcgcccacacgaccggtttgcgccttatcggcacgaacagcgtgcaacagcagggtgtgcagcgcgccccggcagagaagcaacaacatcagcgaccagtgcagcgacccagccgcgcgcaagctccacgtgatcagccatcgcagcaacagcagtcccagcagtcgttccagcagcagtcccagcagtcccagcagtcccagcagtcccagcagtcccagcagtcgcgtcaacgccacgccccaactcctaccccagtcccagtcccagtcccagttccagtatcgacaccgacactaacaccgacaccgacaccgacacgccggcccaagccggctccgtcctcgactcaaccccagcaaggagctccagcacagcgacgacaacaacgagagcagaaaaagcaacctgcgtgccgccgtcgacacgcaacggcagtgagagagacaccgccagcagctccgacagcagctcggacagcaactccgacagcgagaccgacagcgacaacgagatcaacatcgacaacgagatcaacagcgacagcgacatcgacaacgagatcatcagcaccgacatcgagaccatcagcaccgagaccgagatcatcagcaccgagaccgagatcatcagcaccgacaacgagatcagcagctccgacaacgagatcagctgcaccgacagcgatagcgacaaccagcgtttacaaaagtcgacgcacgaccaacgccatctctggcgcaacgacgcgacgcagtgcgtcatccaagcgtgcgccaatgcagccccgaactgcattgacgccaacacaacaacaacaacgacagtaagcggggggtccagaccccacaagagagaagcaggaatcatggtccgcatggaccagtagggcacgctccacaaaggttatcgccctcaaacccatcacacgaaggatctaaaaagaaagcaacaatcgaaatagtaaatagtaaatagcttagaaaggtcaacatgcgaaatgcatgaggaacgtaagatggtaatacatttttata

SEQ ID NO: 1078 - DNA, 7103 bp, Phytophthora infestans
  source 1..7103: mol_type = unassigned DNA
gtacggccgaatccctggcctctcagcctgtacgcggggctatacttggtctaagtatgccccggtcgctggcctctgagcccgtacacagctcggcctcgcggctgccttcccaggcgccgccgacttcgcgctctggcgcggcccacacgccgccgccgagcctccaagcgcgcccgttggcttccgcagacgcagggctcgcggcgacggccctcgccagcccccaagaccccccctacgatgtggcaccacccggcagggcggccggcaggctgcccgactcggtatcgccgggtgctacactctcagccgccacagctcgggccttggcggtccgccattggcccttggagctcgacagcgacagcagcgacgacgaggacgctcaagacccccacgccgccgccccaggaccccccgcagacgtcgcgagtgtgcttgccccacccggcagggcaggcagcatgctcgccgacccagcagcgctggcagccggtctggctcgcgctccgccgcccccatcggcaccccaggacccaagccccgccctccctgctggccccgccggccagaaccctcgcgccgccgccccagcccgtgttgaagtccacacagtcgtggcaccacccggcagggcgggcggcatgctgcccgacccggggttggttgactcaagcccagcagcggctaccgcagctactccagctccggtagctgctactgctacaactgctcgcgtcgccgtggagcaccacgcgcacgctgagccgaaccaagaacatctaccgatggctcgcgtgctcgtggagcccatgcaggtcgacgagtgcagcagctgcgaccgcagcactttgacagccgacgacgggagcggtgacgacgttgcagccccaagctccatgctcagcaacgacgtcgccgcccccatggacgttgactccggcaccagttgccctccaacgttgcagcagccgctccagcgaccgcgtgcgctgcacgtaggcagcaagcgccgccgactcaacgcagatgacggtgaagaagctcaccagctgcaagaagaggaggaggctggcattcatgccccagcgctcaggctatccgcggccagcgctcaaccggcctccgtccttgccgtgtacacgcacaacgcgtcgcggttcgactgcacgctgtgcgcgtacacggccggcagcttcgcatcactgaagacgcacaggaactctcggcaccgccgcaccgcattcctcgaccgattctcggcgggttgcgcgtgtggcgtgcccttcgcctcgaggctggctgcagcaagacacgcgcaagcgtgcgccagcctctcgagcgcaccattggccgaggcttcgtcggcagcaggagcatcaagccacactgtcgacggagccgactccaccgtctcagccgcgggtcacgctgagcccgacctgccccgccacaacgccacggagctcacagcgtcccccccgctggtgagctccaccgatgttgaagtgcaggcaacagagaccgaggccaccgagaaccgctggggcactccacttccgcgcgtgctggtcgcgtctaggatcgccgggcgcctcgctcaggtgccacccccacgctggggccccccgctaccgcgcaccaccatcgcgggccgcattgcgacgaggctcgccgccacacctgccccccgctggagcccaccgcttccacgaagcctggttgcgtcacgcatcgccggccgcctgctacccgctctgccagacgcgcctgcatgcgaggacgaggccaaggacagcgacgaaatggactgggaggcgagcgagccgcacgtcgaagcgccagggccggtcgacgaggagaccatcgacgacgccgacggcgagtggctcctgcgctttgacggtgcctgccgtgccaacccaggcccaggcggcgccggcgcagctctcttcaagccaagcggtcccgtagtgtggacttgttcccactacgacccgagcaccacggcaacgaacaacacagcagagtacactgcgttgcttctcggggccagggccgccgccgaccacggcgtcacgaagctgcgcgtcgagggcgacagcacgctggtcatccagcaagtgcggggcatcttcgcgacgagaagcacgcggctccgagcactgcgcaacaaggtcaagctcgagctcgcgcgcgtggggagcttctcgctccaccacatcgaccggcaggcgaacggtcacgccgaccgccttgccaacgccggcctcgaccgacgccgcacccagctcgagtgcagtgtgcaccccgatggtaggggctgcaccaacacctccgtagcgaccgcagcgcctacagcttctgcagcaccctcgaccccaacccggcctcctgcaactacggccgctccgtttcacagcgaccaaggccacatcgacgaggacgacgaacgtcgtgccgacatcgacgacggtgaaatctacgccccaatgacgctcgggccagacgaagtgcctgctcggcgaccgcgcctccgactccgccaactcagcgacgaagaactcgaggccgctggtgccatcgtggaaaggctcagcgcatcgttgtcagccaagatcaccgacgcagaagactgggggacggcagaaggctacattacggccctgcctcacctgctgtacgacaagctcctaccgtactcgcggacagcgccccgtcatcagcggccaccccggccatcgcgcaaccagcaagaccacccgcagccgcgacgcgaccaaccgcagcgcaacgtggacgaacagcagcatgcggagtcacagcagggtgaagaccagcgacagcagcagccgccgacgcgccgccgacgtcggcgagggaagcgtagaggccgccgacagcgacgacaccctcgccagccaggacagagtaccagagcctcccagcaaagccggcagcgccgaccccgacccccgcgcgttacccgccaccaccgcgagcaccgcatcgacgaggcgttggatgagctccatacactggagcgggcgcggccacaggaccgatcggcgattgacaaggcgagacggcgcgtcggacgtgtccgcggggccatcaaccaacacctgctgcgccaccggtttgacaccgacgagaaggcgtgcgtggcggacatcttggagaaagcgcacgcggcgcgagcggcacgtacggcacaggcggcgggcgcagcaacgtctacaggaggagcagcgacagcaccaacacagcaagcagccacgtcagcccttggtgatgccgacgacggaacctgccccatcctggccgacgagctctggcagtacttcaccggcaccaacacgccgcgctgggagttcaaccccgcgacacccgtcggcgaggcgttccgtacggcgatggcaaggcttcctccggcgacgaggctccgcgaactgctgacagaagccccgactgcggacgaaatcgagacccagctacagcacgtgcggggatcctcgagcccaggactcgatggcatcggctacgacgtctaccagcgcttcgcacagcaactgctcccggtgctcaccgcttcgttcaagcgatgctggacagccaagatggtgccacagagctggcaggtgggggtcgtgcgactgctgtacaagaagggcgcgcatgacgacccggcaaactggcggcccatttgcctccagcaagccatctacaagctttacacaggtgtacttgctcggcgactcgtgcggtggctggacgtgaacgacaggcacgcaccaggacagaaggggttcagggcagtgaacggctgcggggagcacaacttcctcgcagccacgctcatcgaccaagcacgtcgcaagcgccgatccctatacgaggtatggtacgacttcaggaacgccttcggcagcgtgccattccagctgctgtgggactcgctgcagcgcctcggcgctcccgcagacttcatcgacatgtgcaaggggctgtaccaccaggccgccttcgtcatcgggaacgccgccgacggaccgacagcagcaatccggcagcaggttggcgtcttccaagggtgcccactgagcccccagctcttcaacgtcgcgatcagcccgctgctcttcgcgctccgcaggctgccggagaccggggtgcagctgtccggcgacgatcgtgttggagtttcggcttatgcggacgacctcaagaccttcagcagcaccaaggcgggcgccaccaagcaacacgagctcgtcgccgcgttcctggcttggactggcatgaaagccaacgcagccaagtgcagcagcatgggcgtacggcgcaacagcaacggcgcgacagaggcggacaatctggacctcgcgctcgacggcactccgatccccagcatgactcacatgcaatcgtacacctacctggggatcggagacggtttcgaccatgtgcaccgccgcatcgagctcgcgcccaagctgaagacgctcaagcaggacacgacggcgctactcgagtccggcctcgcgccttggcaggtggtgaaggccgtgaaggtttacctttaccctcgtgtcgagtacgcgcttcggcatctgagacccgaagaccagctgctggagagcttcgaccttcacctccgcgccggccttcgccacctgctccgcctgcccaagaacgccaacaacgacttcttctactcgccggtctcgcgcggtggcttgggactcctgccgctggtggagctgcacgcggcgctacaaatcgcgcacgggtggcagatgcttaactcgacggacccagccacccgacgcatcgcgcgcgagcagctccaccagattgcggatgcaaggcaccgccttgacaaggcacactggaaagagcgtggcgatgagctctgccagctcttccttaacttggacctcgggacgtcggcccacgcaccgcccaaacgccgcaactgcgacatcggctcgctgtgggtcgacgtccgcaagaacctgcaggcctttgggctcaagctcgagaccgccccggccgacgctgagtccggcacacccgccctgccgctgcagcttcgcgtgccacaccacgagaagtggttgacgcaccgcgacgtgctgcggcacgtgaagcagcacctgaagaacaaacattggcgggcgtggtgtgccttccaagaccaaggcaggacggcacgggcacacggtggggtcggcagcagcttcatcacccgcccccgtggcatgtgggagagcgactaccgctttgcggtggccgctcgcctcaatatggtggacacgagtgccactctcgcgcgccgacgcctccgcgcccatgaccgctgccgctacccgggctgccgctggaaggagtcactggagcacgtgctcaaccactgtccgggcacgatggacgccgtgcgtggccgccacgacggtgtgctccgagagattgagcacgcgctccgtgcaccatcgggagcacgcagagagctgcgcgtgaaccagacggttccgggcctacccggccccgcactacgccccgacatccaggtctacaaccacgaccaacgcacggtcgcagtggtggacctggcggtggccttcgacaggcaggaccgcgacgacccagagacctcgggcctggccaaagccgcggcggagaagaaggccaagtacactggcatccagcgacacctcgagcgccaagggtggaaggtccacctttccgcgctcgtctacgggtcactgggctcggtggcccccaacaactacaaagtctacacggagcacctggggctcctcaagcgtgacgccaagcggctggaccggacgctgtcggtcgcgtgcatccagtccagccgccgcatctggaacctgcactgcgccaagcatcgggcgcggcagcaccagacgccatcccagtcaaggggcaggcgggtgacggagaccgggggggctccgtcgcgcaccgatcgccgctagacggcaaagttctggcccgcgtaggccgaaagggccccgcccaggtagggtaacgccctcgggaaaaccattctggtgtttggctgtttttcaacagtcgaacttcaactcggagcatatcagatacacttactcacacatttagatatcagatagggaacctttattagggagataacgggtacaccggatggtaaatatacaaaaccttctctgttctaatcagtgtgaaaactggttttcgccttttggcggactttttcactcgcatttttgggcaatcgtctgcggctagcttgctagcggcggacgagcggtctccgggggcgttcacctttcccccgcgaggccaactacaccgatcttctctacacttttctaattcgcctccgtcttcggtcttcggttgtcgggcttttttctttttgaccaatcagagcgcgccatgcgactcttctggccaatcagagaccgggccctgtcctcggacagcgaggcctccacggccagccaatcaagtctcggcagcgacgcgtctttctatagcgcagctgacgaggccgatctggcggcccccgattggtccgactttcggccaatcagcgacgacgagggggcaggggtttacacttttgcccccgtttcggcttcaacttcaggccaaaatggcgatttggaccctccacgcgccgtgccactgctcggcaccggcggcgattcagcgggtgcaacttcgggcacgtgtgcaacacatgcagcgcccattgcacgccaagcggcatcgcgggacgacgcctcggccgctcaagcgcagccccgcccttccagcacgacctcgcgccgtttggcggatcgccatcaagacgtgcgagagccaggcggggtcgggcaaaatatacttactctaagtatgcccgaatccctgccctctcaggctgtacgcggccccatacttgacctaagtatgggaggatccctggcctctcaggctgtacgcgrggaccaagtacagccgaatccctggcctctcagcctgtacgcggggctatacttggtctaagtatgccccggtcgctggcctctgagcccgtacgc

SEQ ID NO: 1079 - DNA, 5289 bp, Phytophthora ramorum
  source 1..5289: mol_type = unassigned DNA
tgcgcggcagaccaagacgcgcagccaacaacagaccgtgcagcgtgcgggtggaaagcgccgccgcctgaacgctggtgacgatgaagaccagcgagagctggccgagctcctgctcgtggacgaggacaaggctggcgccgaacaccccgcgctcaggctgcccacggccagcgctcatccggcctccgtcctctccgtgtacgcgcacgctgcaactcgcttcgactgcacgctgtgcacgtacacggctgccagcctcgcttcgctcaagcgccaccgctcgtctcggcaccgacgcacggccttcctcgacaagttcttggcgggctgcgcgtgcggcacgcccttcgcatcgaggttggccgcagccagacacgcgcaagcgtgcgccaacctctgcaccacctcggcgacgacttcgacggcagcaaaggcatcaagccccactgctgccggaggcagacccaccgtccgtgcagtggtcaccgccgcgcccgacctgccccgccagtatccctcggagctcgttgcgtcccccccgcagccgagctccaccaacgttgcaatgcaggaccaggtcgacgcagagcagcaggcgcgaaatcgctggggcccaccgctccctcgaccgctggtggcctcccgggtcgcagcccgactcggcgaggtaccgccgccgcgatggggcccaccacttccgcgaggggtggtggtgtcccgtattgcggcccggctggaagccgtcccagtcccacgcgggggacccccgctcccacgcagcttcgtcgcgaccaggatcgcagaccgcctcgctcccccctccccggacctgtcgctgctggacgaggagatgaaggagagcgagccgcctgacccgacgcaccactcagcggacgaggattccacggacgcagagacggcggacgcagtgatggagcccgcgttcgtcagcgacccacccacggcgacaccccgggagtggcgcctccaattcgatggagcttgccgtggcgggcccaaccccggtggtgctggcgcactgctctacaaccccgagggtgctgtcgtgtggacgggttcgcactacatgccgggcgccaaggagacgaacaactcggccgagtacacggccctcctgatcggcgcccgcgcagcagcagaccacggtgcacgacagctgcgcatcgagggcgacagcctgctggtcattcgtcaagtcaagggattgtacgccaccaagagcactcggctgcgacagctccggaacgccgttcgccacgagctggctcgggtggggcagcactcgctccaccacatcgaccggcaaggcaacgcgttcgcggaccgcctcgccaaccgggcgctcgacctgaagagcgacaaagtcgagtgcaaggaacaccccgtggccggcgcgtgcacgacatgcatgggttcgccctcggcgggcccgccagcgacaccgccccctaccactgccgacatcgagatggcggacgcggggagcgacgacgagctccgagcagacatcgacgacggtgaagtgtatgctccgatgcgcttagagcccggcgtgatcccgacccgccgctcgcgcctccgccttcgccagctgaccgacgatgagatggaggcagctggtgaggtagtcgagcgcttgagtgcgggcctgtcggccaagatcgcggacgccgacgactgggagacggcggaaggctacatcacagccctcccgtacatgctctacgacaagctgcagcagtacactcaggtgcggcatggcacggctcgttcaccagcgccccacccacagcgccgagacgtccaaggccaggtggaaacccaccgggagccgcggcacgagaccattggtcagccagaccagccaggtgagccgtcaccgacgcgccgccgccgccgaggaaagcgtaaaggccgccgccagcgacgtcatccccgacggaccaattgtggtggtggtggccgtcagcagcggaagcaacggcatccacgcccaccgcgcgggacacgccaccacagggagcaccgcatcgacgaagccatcgacgaactgcacgcgctggagcgtgcccgtccccaagctcgcccagccattgccaaagctcgccgccgagttggccggatccgatcggcgatcgatcagcagcttctgcgccaccgcttcgacaccgccgagaaggagtgcgtggatggcatcttggcagcagctcgcacggcacgcgacgcacggacaacagtgagggcggccgcggcaacagggacgacagcgactccagagacggcagtgacgagcggtacggagcagcaggacgataacggcacctgccccatcccgagcgaggtgctgtggagacacttcgacagcgtcaatacgccccagagggacttcgacccggaggctcccgagggtgctgcgttccgttctgcgatggcccggctgccagcagccacgcgattcatggagctgctgaaggaagagccgtccacggacggcatcgaggtccagctgcagcacgcgagcagcacctccagcccgggcctcgacggcgtcggctacgacgtgtacaagcgcttcgcgtcgcagctgctgccggtgctgaaggcggctttcaagtgctgctggacgcacaagcaggtgccccagagctggaagctcggcgtggtgcgcctcctgtacaagaagggcgaccgtgaagacccggcgaactggaggcccatctgcctccagcaagccatctacaagatctacacgggggtgctcgcgcggcgcctcacccgctggcaggacgccaacgaccgccacgccccgggccagaagggcttccggccggtgaatggctgcggggaacacaacttcctcgcggccatgctcatcgaccacgcgcgccgcaagcaccggccactgtacgaggtgtggtacgacttccggaacgctttcggaagcgtacccctcgggctgctgtgggacgccctggagcggacaggcgttcccgccgagtacatcgctgccgtccagggcttgtacgaccacgcagcgttcatggtgggcaacgcggtggacggcagcacggcgccgatcctgcagcgtgtcggagtgttccaggggtgcccgctgagcccaccgctgttctcggcggcgatcagccccctcctccacgcgttgcagctactgcccagctcaggagtacagctctcgggtgacgaccgcccgggtgtctccgcgtacgccgacgacctcaagaccttcagcggcaccaaggcgggcgtcaccgagcagcacgagctagtggccatgttcctgcgatggaccggcatggcggcgaacccggccaagtgcaggtcgatgggcgtgcgccgcaacggcaacggcgccatcgaggcggaccacctggagctggcgctggacgacacgccgatccctacgttgacgcacctgcagtcgtacacgtacctggggatcggcgacggcttcgaccacgtgcgccgccgcgtcgcgctcgcgcccaagctcaagttgctcaagcaggacgcgacggcgctgatggagtccggcctcgcgccgtggcaggtggtgaaggccgtgaaggggtacctctaccctcgggtggagtacgccctccggcacctgcgacccgacgaccagctcctggagagcttcgacctccacctccgccgcggcctccgccacctgctccgcctccccaagagcgccaacaacgacttcgtgtacgcgccggtgtcgcgcgggggcctgggcttcctgccgctggtggagctgcacgcggcgctgcagattgcgcacgggtggcagatgatcaactcgcccgacccagccatccggcgcatcgcgcgcgagcagcttcaccaggttgccgacgcgcggcaccggctcgacaaggaccactggaagcagcgcggtgacgagctgtgcgagctcctcctcaacggggagctcgggacgtcggcccacgcgccacccaaacggcgcaacggcgacattggctcgctgtgggtcgacgtccgcaagaatctcaaggccttcgggctgaagctcgcaaccgcgcccgccgacccggagtccggcgcacctgccaagccgctgcagctttgcgtgccgcaccacgctgagtggctggaccaccgcaacgtgctgcggcacgtgaagcagcacatgaagaacaagcgctggcgggcctggtgcagccacgtggaccaggggcggacggcgcgcgcgcacggaggcgtcggcagcggtttcctgacgagaccgcggggcatgtgggagagcgactaccgcttcgcggtggccgctcgcctcaacatgcttgacacggtgaacgtgctcgcgcgcagacgcctccgcgcccacgaccgttgccgtcacccgggctgtcggtggaaggagacgttggcacacgtcctcaaccactgcccgggtacgatggacagcatccgcggccgccacgacgacgcgctcaaggaaatcgagcgcacgctccacgcgtcgtcgggcgaccgccagggccgcaccgagctccgcacgaaccagaccgtgccgggcctggccgggccagctctgcgccccgacctccaggtctacaaccacgaccaacgcacggtcgcggtggtggacctggccatcgcgttcgacgagcagccgcgcgacgacccagagagctccgggctggcgaaggcggcggccgagaagaaggccaagtatgcgggcatcaagcgacacctcgagcgccaagggtggaaggtccacctctcggcgctcgtgtacggctcgctgggctcggtggcacccagcaactacaaggtgtacaccgagcacctggggctgctcaagcgggacgccaagcggctggaccggcagctgtcggtggcgtgcatccagtccagccgccgcatctggaacctgcactgcgcccagcaccgcgccaggcagcaccaagaccaaccagccccaaggggcaggcgggtgacggagaccggggggactccgtcgcgcaccgatcgccgctagacggcaacactctggcccgcgtcggccgaaagggccccacccacgtagggaaccgccctcgggaaacccagtctggtgttcggccaagaaatgcaccaccaccacggcggaggtgcatttcgacagtcgaacttcaacccgccacatatcggatatagttacagctctagttagacatcggataggaacttcttagaaaattaacgggtataccggatggtaaataaaataaaaacttc

SEQ ID NO: 1080 - DNA, 6562 bp, Phytophthora infestans
  source 1..6562: mol_type = unassigned DNA
agctcggcctcgcggctgccttcccaggcgccgccgacttcgcgctctggcgcggcccacacgccgccgccgagcctccaagcgcgcccgttggctttcgcagacgcagggctcgcggcgacggccctcgccagcccccaagaccccccctacgatgtggcaccacccggcagggcggccggcaggctgcccgactcggtatcgccgggtgctacactctcagccgctacagctcgggccttggcggtccgctattggcccttggagctcgacggcgacagcagcgacgacgaggacgctcaagacccccacgccgccgccccagaacccccagaagacgtcgcgagtgtgcttgccccacccggcagggcaggcagcatgctcgccgacccagcagcgctggcagccggtctggctcgcgctccgccgcccccatcggcaccccaggacccaagccccgccttccctgctggtcccgccggccagaaccctcgcgccgccgccccagcccgtgttgaagtccacacagtcgtggcaccacccggcagggcgggcggcatgctgcccgacccggggttggttgaagaacctatccaagcgacgtacgcgcacgacgctgcccagttcgagtgtgcgttgtgcccgtacgtcgctgagagcatggcagtgctcgttcagcaccgacggtcggctcaccgcggcacccgcttcaaggacatcttcaccagcgggtgccagtgcagcctagtgttttacgcgcgcattgttgccgccagccatgcagtggcctgtgccaggcgcaaccagcgagccgtgccaccagctccgacccctgttgcccccacgcggcccgaggctaccccacaacctactgggtacctcgccgcggcgatgactgccgctgcggcagccgcatcaagcgacaccgtagtggcagccgccaccaacatgcagagcgccgtgccagccgccgccaagactactgggcttcagctcgtcccccccgagctggagcctgcccttccgcagcgtgcttcttgccatgcaggcaaacgccgtcggctcaatgccgacgaggcagtgacaccgtgtacgcctacggcgcgggtgtcgccgcaaacagaagtggcgatggcgcctcacgacgcaccccaggacgacaccgtcctacagcgtgaggccgccgagccacagccagacccagcagcaacgcagggtgcccaagtgcagcgagtcgaagacacaactgcggcgcaggatgacactgtgcagcaggaccacgacgccgacactgcccaggtctcgccgccccggcgcacaccgacacgctggggaccaagaccaagctcaactcaagagcctagccccatgacaggcgagccggctgccaccctggcagcgcgaagaccactgactcctgccgcaacgggcactcgtgccacgcggtgggggccatgtcaccgcgcgatcggggccgcagccatcgcacgacttgtcacgggccttccaacggagccagcgcagcctcagcgacggcagccaccgccaccacaagaacctcctttgcagccagagccacaagcagcagcagcaacagtcgcagcagacatcgcagcaacagtagcagcagacattgcggcagcagcagcgaacgcagcaatggacgtggatggtggaccggcagccgacgagacatggctgttgcgctttgacggcgcatgccgacggaacccaggacctggtggagcaggtgccgcactctttgcgcccagcggtgccgtagtatggacgtgctcgcacttcatgccgagccgctccgaaacgaacaacaccgccgagtacacggcgctactgctcggcgcacagagcgcagtccaccacggcgccaaacgcttgaatatcgagggcgatagccacctgatcctctcgcaagtgcgcggtgccttcgcgtgcaacaacaagcggttgcggtctctccgaaaccgagtccaggcctctcttcggcagctcgactggtaccgcttgcagcacatcgaccgcaaggccaaccagcatgccgaccgcctcgcgaaccgcgccctggacctgcgccgcacggtgaccgagtgcggcccacacgcggagactcgcaatcggtgctttcagacaccgcagcccctcgtcgagcccggcgagacgcattgtgtaccggggtctgatgaggtcctcgctgctaataccgcgatggaggatgcgaccgctgtgcctaccgaagacgacgaggctgaggttgcagcgcgagacgggggtgaggtgtttccaaccatcgccatcgggcctgactccgcccctgccaagcaaccacggcttcgcctcaagaagctggacgaagacgatttcgatgcggctgccgccgccgtgacgcgtgtgtccgaggagctggcaagcaagatcgtggacgctggcgactggacatcaggtgaaggctacatcagcgcaattcctgaacgacttcgagcagcgctccggccatttgcccttccgacgcagccagcacgaccacagccccgggagcctcgtatgcagcagccaccccgccggccaccccgcgtcacacgcgaccacctggagcacaggcttgacgaggcgctcgacaccatggagaatgtgcagcgctccacgccgcaaaaccagaaggcagtgcgcagggcccggcgccgtgtcgggcggcttcgttcggcgatggaccggaccagactgcggaagaagttcgccacacacgaacgggagtgcgtggccgagatcctgcgacgtgcttcaacggaggaggcggcgaaccccagtcaggagaaatgtcctatcgaccgcgccaccctccacgagtactttaccgccaccagcacccagcggacaccattcgactacgacagcgccaaaggcacagagttccgcacgttcctggaggtgatgtcgacgcctagccacgagacaagcgcgttgaccgcagagcctacgctggacgagatcgaagaccagctcgcccacgtcaaagccggctcaagtccagggcatgatggggtcgggtacgacgtgtaccgccgcttccaggttcagctgctgcccctcctgcatgcagccttccggttttgctggcgccaccgccgcgtgcctgccctgtggaaggtcggcttcgttcgcctgctgcacaagaaaggtgacccgcagcagccaaacaactggcgaccaatctgcctacagaccgccatctacaagctctacagcggcctcctcgcccgtcgactgtccaagttcctggaagccaacgagctgttgcccatggcacagaagggcttccgagcgttcaacggttgccacgagcacaacttcgtggcaaccacgctcctggaccagacgcgccgcatgcatcgcaggctgtaccaggtctggtacgacctgcgcaatgctttcgggtcgctgccgcagcagctcatgtggggcgtcttacgccagcttggggtgacagaggagtttgtggctcgctgcagtggcatctacgaggactcatacttcgtggtcggcaacgcgagcgacggagcgacggagccagtgcgccaggaggtgggagtataccagggctgcccgctcagccccctcctctttatcactgcgctcgtgccactcctccgggcgctagagaaccaggatggcgttggcgtcccgctcgcagacggagtacgcccgtgcgccaccgcgtacgcggacgacatcaaggtcttctgtgacagcgcgacgggcatccagcgctgccacgccctcgtgacgcgcttcctggagtggactgggctgcaggccaacccggccaagtgcgcgttcctgccggtgacacgcagccagcacagcaaccccacacgcgaccgagacatcgagcttcgcatccacggcgaggccatcgccaccctcggacttcaagaaagctaccggtacctgggggttggcgacggcttcgatcacgtgcgacaccgcctccagctcgaacccaagctgaagcagatcaagcgagaggcggtggcactgctgcactcggagctggtgccgtggcagattctcaaggctctgaaggtgtacatctacccgaaggtagagtacgccctcagacacctgcggccgctcaagtcacagcttcagggcttcgacagcgccatcgtgcgcggcctgcgccacctgctccgcctgccggagaacagccacgacggcctcttcttctcacccacctcggctgggggactgggactgctgtcgctcgtcgagctgcacgaagcgctgcaggtggcacacgcgtggcaaatgctccactccaaggacccggccatccgtgccatcgcgcgcacgcaggtgggacaagtggcgcgcaagcggttcaagctggtcgaggagcactggcgcggacgggaagacgacctcgcacagcgcttcctcaacacggagctcgccgcctcgccccacgccacggagacacgccgcaacggcgacatcggttccctatggaacgacgtccgcgacacgctgcagaccctcggactcaagttcgccgcaggcgacgaggaggaagcacctggactactgcagctccgcgtgccgcaccacaccaagtggctcagccactcgacggtgttgaggcacgtgaagctgcacatgaaactgcgccgcatggacacgtggaagtccaaggtcagtcagggcacgacggtgcgagagcacggcggcgtgggctcacgcttcatcacggcgggtgcaggcctgtccgacgccgagtatcgcttcgctattgcgccccgcgcccacctgattgataccaacagcaccctcaagcgccgtcgactccgggccaacgacacctgccgggctccgggatgctcctacacggaaccccccgcccacatcctgaacaaatgcagtcccaacatggacgcgatcaggaaacgccacgacgatgctctcgagcgtatcgctgacgccctgcggcgcaaggtggagaagtccggcggcaggctcgaggtggccatcaacaagacggtaccggagtacgacggcgcggccctgcgccccgacatcgtactccggaacacggagaccaagcgtgccatcatcgccgacctggcgatcacccacgagaaccagccgaccgacgcgaccacgtcttcagcgctacagcaaagccgtgacaacaagattaccaagtaccagacggtcgcggcggcaatgatgcgcgccggttggcgggttcgcgtgacgggcatcgtctacggctcgctcggctcagtcctgccgagcaacttcaaggtctacaccgagctgctggcgctgctcaagcgggacgcccgccgccttaaccgccagctctccagccactgcatccgggccagcgcgcggatatggagcgcgcactgccgacgacaccgtgagcggcaacgaagcggcaatgcctcgcgagcgtcgcgtgggtccgggggggccccgcggcgcacatcgcaggcatcggcacggcggtaaacgggtcacttgaccgacagggcaccacccaggtagggaaccgccctttaaaacccaggaagacacaaacaccctccacatagtgacatacatattttagcctagatttcagttacggagaggttactaactggtacataaaattacacattctgttctaatcagtgtgaaaactggttttcgccttttggcggactttttcactcgcatttttgggcaatcgtctgcggctagcttgctagcggcggacgagcggtctccgggggcgtacacctttcccccgcgaggccaactacaccgatcttctctacacttttctaattcgccttcgtcttcggtcttcggctgtcggatttttttctttttgaccaatcagagtgcgccatgcgactcttctggccaatcagagaccgggccctgtcctcggacagcgaggcctccacggccagccaatcaagtctcggcagcgacgcgtctttctatagcgcagctgacgaggccgatctggcggcccccgattggtccgactttcggccaatcagcgacgacgagggggcaggagtttacacttttgcccccgtttcgacatcaacttcaggccaaaatggcgatttcgaccctccacgcgccgtgccactgctcggcaccggcggcgattcagcgggtgcaacttcgggcacgtgtgcaacacatgcagcgcccattgcacgccaagcggcatcgcgggacgacgcctcggccgctcaagcgcagccccgcccttccagcacgacctcgcgccgtttggcggatcgccatcaagacgtgcgagagccaggcggggtcgggcaaaatatacttactctaagtatgcccgaatccctgccctctcaggctgtacgcggccccatacttgatctaagtatgggaggatccctggcctctcaggctgtacgcgagacccgtacggccgaatccctggcttctcagcctgtacgcggggctatacttggtctaagtatgccccggtcgctggcctctgagcccgtacaca

SEQ ID NO: 1081 - DNA, 5021 bp, Phytophthora ramorum
  source 1..5021: mol_type = unassigned DNA
ccaggaatcacccccgccgcccccaagcgctccgccgccgagcccagctgcggctgctgccgccccactggtgacggcagtcgcagctgcccctgccacctctcctgttggccgcgccgccgtggagccccgcgcgcgcgccgagccgccccaagaacaagcacccccagctagcgcgcgcgtggagcccatgtcgggcgacgtggtcagcagcgacggcagcagcaggacgacggacgcgagcggcgacggcgacgacggcgcaggcagcagcgatgcagcaggcgatgtcggcgtcgtcgccatggatgttgaccaaggtgcccgccgacagcagccgccatggcagcgcgtcggcggcaagcgtcgacgtctcaacgacgtcgacgacgaagacacccgcgagctggccgagctcctgctcgaggaggaggacgaggctggggaccacgctccagcgcctaggctatccgcggccagcgctcgcccggcctccgtcctctccgtgtacgcgcacaatgcgcagcgcttccagtgcacgctgtgcacgtacacggccgccagcttcgcgtcgctcaagcgacaccgggactcccggcaccgccgcaccgccttcctcgaccggttctcggcgggatgtgcgtgcggcgtgcccttcgcgtcgaggctggctgctgcgaaccacgcacacgcgtgcgacagcctcaaccgcaccttctcggtagcggctgcgccggcagcaggggaattgagccccactgctggtgcagccaacgccactgtcaaggcggccactgtcacgcccgactccccccgccaagaccccccgaagctcgcagcgacccccccgctagcgagctccgctcttgtcgtcgacccggaccacgccgagcaacaagcccgcgagcgctggggcccgcccctacccaggacgctggtggcaggccgtgttgcagcccgcctcagcgaggttccagctccccgctggggacccccactgccacgcggcgtggtggcattccggatcggccaccgcgtgctcccgccggagatgacgagcgacgaggagacgaaggacgactcgagtgtccaggacggcgaccgccaggactacccggtggccgcgatggacgtggacagcggcatgagcggcgagtggctgctgcgcttcgacggcgcctgccgcgccaaccctggcccaggtggcgccggcgcagcgctgtcccagcccgacggctccgttgtatggacttgctcccactacatgccgagcagcagcgaaaccaacaacaccgccgaatacacggcgctgctgctcggtacgcgagccgccgccgaccacggaaccacgaccctgcgagtggagggcgacagcaccttggtgatccagcaggtgcgtggcatctttgccacgcggagcgtcactctccgccacctccgcgaccaagtcaagctggaactcgcccgggtggggagattttcgctccaccacattgatcgccaagccaatgcccacgccgaccgcctcgccaaccgagccctcgacctccggcggacagtgtcggagtgcggcgtccaccccgacgggaacggctgcacgcccacggccatcgacgaccgacccctagcgccgactcagcagccacctgacgccccgccaccgccgcccgccgccgacattgagatggaggacccggacgacgaggacctcgccgacatcgacgacggcgaggtctacgcggccatgcgcgttggcccgaatgccactccgcagcgacgacgccgtggacgctcaggcaccgcgaagaagcaccgccgccagcgcccaccccgggtgacccgacaccaccgcgaacaccgcctcgacgaggcactcgatgacctccatgcagtggagcgctccacccccagcgaccgcaccaccgtccgccgggcacgacgccgcgttggacgcgtcaattcggccatcgaacagcagcgcctccgccaccgcttcgacacggacgagaaggcatgtgtcaccgacatcctggcgaaggcgtgcgcgacgcgagaggcagcgaggaccacggcctccggcggtgatccacctgcaggcccggcgacgccagcggcaggcagcgcagacgacggcacctgccccatcttgggagaagaactctggcggtttttcgacagcgtcaacacgccgcgccaagaattcgccccggacgccccggtgggtgccgccttccgctcggcgttggcacgcctaccggccgcgaccagttgcaaggagctgctgactgcggcgccgtcggccggcgaagtggaagaccagctacaacacgtccgtggcgcctccagccctggactcgacggcgtcgggtacgacgtgtaccagcacttcgcggcgcagctcctgccggcactgaccgcggcattcaaggcatgctggacggcgaagagagtgcctcagagctggaagctcggggtggtgcggctgctccacaagaagggcgcgcgcgaggacccggcaaactggaggccgatctgcctccagcaagccatttacaagctctacacgggactcctcgcgcggcggctggtgcgttggctagacgccaacgaccgccacgctccaggccagaagggcttccgagcggtgaacggctgcggggagcacaacttcctcgcagccacgctcgtcgaccaagcccgccgcaagcgccgcaccctcttcgaagtctggtacgattttcgcaacgcgttcggcagcgtgccattcgcgctgctgtgggacgcgctggcgcggctcggcgtgcccgacgactacgttaccatgtgcaaggggctctacgagagcgcggcgtttgtcgtcgggaacgctatcgacggcacgacggacccaattgcgctgcgggtgggcgtcttccaagggtgcccactgagcccccaactcttcaacgctgccattagcccgctgctcttcgcgttgcagcggctgccggccacgggcgtgcagctgtcgggcgatgactgccctggtgcctcggcttatgccgacgacctcaagattttcagtggcaccgaggacggcatcaagcgacagcacgcgctcgtggccgacttcttgcgctggaccggcatggcggcgaaccccaacaagtgctgcaccatgtcggtccagcgcgacggacgcggcgtgctcaagactgacgacctccagctagacctggctggcacgccgatccccgcgctgtccatgagcgcttcgtacacctacctggggatcggcgatggattcgatcacgtgcgccgccgcgtcgagctcgctccagcactcaagcagcttaaggacgacgcgacgacgctgctgcagtcgggcctcgccccgtggcaggtggtgaaggcggtgaagacgtacctctacccccgggtggagtacgctctccgccaccttcgccccttccaacagcagcttgagggcttcgaccggcacctcgcgcgcggcctccgccacctcctgcgactgccgggcaacgccacggcggagtgcttctacgctccggtgtcgcgcggcgggctgggcctgctgccactgacggagctgcacgcggcgctccaagtcgcgcacggatggcagctgctgaattcgaaggaccctgccatccggcgcatcgcgcgcgtgcagctccggcagatcgccgacgcgcgccaccgtatcgacagccgcgcatgggaggggcgcgacgaggagttgtgcgagctgctgctcaactcgcagctcgggacgtcgcccgacgcgccaccgaagcgtcggaacggcgacatcggttctctttgggtcgacgtccagcgccacctccgcacgctcggcctcaagttcgcgaccgcgccggcctgcgcggacgccggctctgcggcgaccacgttgcagctccgcgtgccgcaccacgataagtggttggaccatcgcactgtcctgcggcacgtgaaactgcacgtgaagcaccggcactggtccaagtgggcggccatgcgcgaccaaggcaagacggcccgcgcccatggcggcgcggggagcggcttcctcacccggccacgaggcatgtgggaagccgactaccgcttcgcggtggccgcccgcctgaaccagctcgacacgcacagcgtgctgaagcgccggcgtctccgagcccacgaccactgcaggcagccgggctgctccagggcggagacgctggcgcacgtgctcaaccactgcgccggcaccatggacgcggtccgcggccgccacgacgacgccctcaagcacatcgagcgcgcgctgcacgcgtcgtcgccgggcggccaggaccgcgtcgagctccgggtgaaccagacggtgccgtcgctcgccggccccgcgctacggcccgacctccagctgtacaaccacaccaagaagatggtggcggtggtcgacctggccgtggcgttcgaggagcaggcgagcgacgacccggagagctcggcgctggcacgcatcgccgcacacaagcgcgcgaagtatgccggcgtcaagcgacacctcgagcgccaagggtggaaggtccacctctcggcgctcgtgtacggctcgctcggcgcggtgccggccggcaaccacaaggtgcttactgagcaccttgggttgctcaagcgtgatgcgaagcggctggaccggcagctctcggtggcgtgcatccagtccagccgccgcatctggaacctgcactgcagccagcaccgcgcgcgccagcaccaagcaccagggggaagtcgggcggcggagaccggggggactccgccgcgcaccggccgccgctagacggcacacaggcccacagcggccgacagggccacacccaggtagggaaccgccttcaaacccggccggtacattatggtccgacacctatgaggtgcaaccggtacacaagttacacaccacatagcgactaccaggtatttactacctggaagccaaggattaaccggtcggtaatacacataacttt

SEQ ID NO: 1082 - DNA, 5369 bp, Phytophthora infestans
  source 1..5369: mol_type = unassigned DNA
ctcaagcctagcagcggctaccgcagctactccagctccggtagctgctactgctacaactgctcgcgctgctgctcgcgtcgccgtggagcaccacgcgcacgctgaaccgaaccaagaacatctaccgatggctcgcgtgctcgtggagcccatgcaggtcgacgagtgcagcagctgcgaccgcagcactttgacagccgacgacgggagcggtgacgacgttgcagccccaagctccttgaacagcaacgacgtcgccgcccccatggacgttgactccggcactgattgccctccagcgttgcaacagccgccccagcgaccgcgtgcgctgcacgtaggcagcaagcgccgccgactcgacgcagatgatgaggaagaagctcgccagctgcaagaagaggaggaggctggcatccatgccccagcgctcaggctatccgcggccagcgctcaaccggcctccgtcctcgccgtgtacacgcacaacgcgtcgcggttcgactgcacgctgtacgcgtacacggccggcagcttcgcatcactgaaaacgcacaggaactctcggcaccgccgcaccgcattcctcgaccgattctcggcgggttgcgcgtgtggcgtgcccttcgcctcgaggctggctgcagcaagacacgcgcaagcgtgcgccagcctctcgagcgcaccattggccgaggcttcgtcggcagcaggagcatcaagccacactgtcgacgaagccgactccaccgtctcagccgcgggtcacaccgagcccgacctgccccgccacaacgccacggagctcacagcgtcccccccgctggtgagctcccccgatgttgaagtgcaggcaccagagacagaggccaccgagaaccgctggggcactccacttccgcgcgtgctggtcgcgtctaggatcgccgggcgcctcgctcaggtgccacccccacgctggggccccccgctaccgcgcactaccatcgcgggccgcattgcgacgaggctcgccgccacacctgccccccgctgggacccaccgctgccacgaagcctggttgtgtcacgcatcgccgcccgcctgctacccgcgctaccagacgcgcctgcatgcgaggaagaggccaaggacagcgacacgatggactgggcgccaacttggacaaacgaggagaccaaggacagcgagccgcatgacgaagcgccagggcaggtcgacgaggagaccatcgacgacgccgacggcgagtggcttttgcgcttcgacggtgcttgccgtgcaaacccaggcccaggcggcgccggcgcagctctcttcaagcccagcggccccgtagtgtggacttgttcccactacgacccgagcaccacggcaacgaacaacacagcagagtacactgcgttgctgctcggggccagggctgccgccgaccacggcgtcacgaagctgcgcgtcgagggcgacagcacgctggtcatccagcaagtgcggggcatcttcgcgacgagaagcacgcggctccgagcactgcgcaacaaggtcaagctcgagctcgcgcgcgtggggagcttctcgctccaccacatcgaccggcaggcgaacggccacgccgaccgcctcgccaacgccggcctcgaccgacgccgcaccaagctcgagtgcagtgtgcaccccgatggcaggggctgcaccaacacctctgtggcgaccgcagcgcctactgctcctgcagcgcccttgcccccagcccggcctcctgcaactacagccgctccgtctcatgatgacgaccacagcgttcaaggcgacatcgacgatggcgaagtatacgctgcaatgtgcatcggccccgatgcggtgccgcaccgccgaccgcgcctccgcctacggcacttgacggacgaggagtccgaggaggctggcgacgtcgtggagaggctggcagcgtcgctggcggcgaagattgcagacgcgcccgactgggagacggcggagggctacatcacagccctaccgtacgctctctacgacaagctgcagccgtactcccaggcccagcctcagcctccaagccaacagcagcagcagcagcagcagcgaccacggcagcagcagcaaacacggcagcgtcgacagcggagaggcaagcgcggcggtggcagccaacgcaggcagcggaagacgcgccgccgacggcccccgcgggtgacacgccaccaccgcgagcaccggatcgatgaagccctcgacgacctccacgcgatcgagagcaggcgccctcaagacaggacggccatcagcaaggccaggcgtcgagtcggccgcatccgctccgcccttgaccagcaccaattgcgccaccgcttcgacaccgatgagaaggtgtgcgtggacgccatcctggctggggcgcgagcgagccaaggagcgacaacggcaccaccgtcggcaaccacggaccccccagctccgatggacgacagcaggtgccccattcccggcgacgatctatggaggtttttcgacagcgttaacacgccacggcggtcgttcgacgcagaggcaccagacggagctgccttccgcgaagcgatggcgtgcttgcccgccgccacgagagcccaggaactgctgacggaggcgcctacggtggacgaggttgaagaccagattcagcacgcccgcgccagctccagccccggcctcgacggcgttggttacgacatctacaagcagttcgccgcccacctcctgccagcactgcacacagcgttcgtgtgctgctggaaccacaagcgggtgcctcagagctggaagctcggcgtggtgcgccttctccacaagaaaggcgatcgacaggatcctgccaactggcggccgatctgcttgcagcagaccatctacaagctctatgccggcatcctgtcacgccggttcgtgcgctggctggacgcaaacgctcgtcacgcagaggcgcagaaaggattccgggcgatgaacggctgcggggagcacaacttcctcgcggccacgctcgtcgaccacgcccgccgcaagcgcaaggagctgcacgtcgtgtggtacgaccttgccaacgccttcggcagtgtgccacacgacttgctatgggaaacgctggcgcgccaaggcgtaccgcccacgttcgtggactgctgccgcgggatctacagtgatgcagccttcaccatcgggaacgccgccgacggcaccacagcgcccatcaggcttcgcgtgggagtattccagggctgcccgctcagcccccacctcttcaccgccgcaatcgccccgctgctccatgcgctgaagaggctgccggtcactggagtgcaactcaccggcgtggaccgtcccggagctgctgcctacgcggacgacctcaagacgttcagtagctccgtggacggaatcaagaggcagcacgagctcgtggcgaccttcctacgatggaccggcatggcggcgaacctttccaagtgcagcgccatgtcggtccagcgcgacagccggggcgtgctcaagacaggtgacctatgcctcaagctcaacgacgcagagatcccagcgctgagcatgacggcctcctacgcgtacctcggcatcggggacggcttcgaccacgtgcgccgccgcctcgagctcgcgccaatgatgaagcagctcaagcacgacgcgacggcgctgatgcagtcggggctggcctcatggcaagtggtgaaggcggtgaaggtatacctctacccccgcatagagtacgcccttcgccaccttcgcccgttcaaacagcaattagaagctttcgacgagcacctccgccgcgggctccgccacctgctgcgactaccgacgaacgccaccagcgccttcttctcagcgccgacatcgcgcggcgggctgggccttctgccgctgacggagctgcacgcggcgcttcagatcgcccatgggtggcagatactcaactccccagacggcgccacccagaggattgcccgcgagcagctccgggagattccagacgcgcgccaccgcctggacactgcccactggaggaaccgcgacgcagagctgtgcgagctgctgctcaactcgcagctcggacagtccagccacgccccacccaagcggcgcaactgcgacatcggatccctttggatcgacattcggcgccagctcggcacgctcgggctcaaattcgagaccgcgcctggccgacgcagtcaccaaccagcccgcccagccattgcagctttcgcgtgccgcaccacgacaagtggctgacgcaccgtgacatagtgcggcacgtgaagatgcacatgaagctccgacactgggccaagtgggcggccatgcgcgaccaaggcaagacagctcgtgcacatggtggggttggtagtggcttcctcacacggccgcgaggcctgtgggaagccgactaccggttcgcggtggccggccgcttaaaccaggtagacacgcacagtgtcctcaagcgccggcgcctccgagcacatgacaggtgcagacacccaggatgcacgcgctccgagacgctggcgcatgtgcttaaccactgcgacggaaccatggacgcagtccgtggccggccatgacgccgcactcaagattattgagcgtgcgctcctcgcatcgtcggccgaccagcaggaccgtgctgagctccgcgtgaaccagaccgtgccgtcactcgccggccccgcgctacggcccgaccttcagctctacaaccacaccaagaagacggtggcggtggtcgacctggccgtggcgttgaggagcaggcgagtgacgacgcgagtagctcggcactgtcccggatcgccaaccacaagcgagccaagtacgaccacatcaagctacacctcgagcgccaaggatggaaggtacacctctcggcactcgtgtacgggtcgcttggggcggtcgctagtggcaactaccaggtgtacaccacacacctggggctactcaagcgcgatgcaaagcggctggaccggcagctgtctgcctaatgcatccagtccagccgccgcatctagaatctacactgcagccagcaccggactcgccaacaccaggcgaggcccagccaaggaccaagaggcagccgggcgacggagaccggggggactccgtcccagacaagccgccgctaggcggaaaccaggcccaagacggccgacagggccccacccaggtagggaaccgccctagaaacccatttcggtggtcgactcgcaagccttacctatattttagacgtagcgaccaaattacaaatttggtaacgagtaagccaaatggtaatacacaaaacttt

SEQ ID NO: 1083 - DNA, 5423 bp, Phytophthora ramorum
  source 1..5423: mol_type = unassigned DNA
ccaggcatcacccccgccgcccccaagcgctccgccgccgagcgcagctgcggctgctgccgccccactggtgacggcagtcgcagctgcccctgccacctctcctgttggccgcgccgccgtggagccccgcgcgcgcgccgagccgccccaagaacaagcacccccagctagcgcgcgcgcggagcccatgtcgggcgacgtggtcagcagcgacggcagcagcaggacgacggacgtgagcggcgacggcgacgacggcgccgacggcgcaggcagcagcgatgcagcaggcgatgtcggcgtcgtcgccatggatgttgaccaaggtgcccgccgacagcggccgccatggcagcgcgtcggcggcaagcgtcgacgtctcaacgacgtcgacgacgaagacacccgcgagctggcagagctcctgctcgaggaggaggacgaggttggggcccaagcaccagcgctcaggctattcgcggccagcgctcacccggcctccgtcctctccgtgtacgcacacaatgcgcagcgcttcgtgtgcacgctgtgcgcgtacacggccgccagcttcgcgtcgctcaagcgacaccgggactcacgacaccggcgcgtgtccttcgtggacaagttctcggcgggctgcgcgtgcggcacgcccttcggctcgaggctggcagcggcgagacatgcgcaagcgtgcgccagcctctcgatcccacgcacggtaacagctccggcggcagcaggagatttgagccccactgccacgggagccaacgccaccgcctcggcggccgcaacttcgcccgatttgccccgcccagcttccccggagctcgctgcgtcccccccgcagacgagcccctttgacgttgccatacaggcagacgctgcagagcagacagcgtggacgcgctgggaccctccgctcacccgcgctgcggtggcagcccgtgtcgcctcccgcctcgccgtggttcccgcgccgcgatgggggccgccgctgtcaaggacgctggtggcctccaggattgcagcacgcctggacgcgcagacgtcacgatggggaccgcccctgccaccggcgatggtggcgtcccggattgcgtcgagactcgccgccatgccggcaccccgctggggcccgccgctgctgcggaccgtgatcgcatcccgcatcgccgaccgactgctcccaccggagttggcggccgacgaggagacgaaggatgacgacgtccacatggacaacgcggccagcgtggacgtcgacgaggagtccgaggtcgccgacgtggtcatgaccgaccacgacggcgaatggctgttgcgcttcgacggcgcctgtcgtgccaaccctggcccaggcggcgccggagccgctctgttcaagcccagcggccccgtagtgtgggcatgctcgcgctacatgccgagcagcagcgcgaccaacaacacggccgagtacacggcgctgctgctcggcgctagggccgctgccgaccatggagccacgcacctgcgagtggaaggcgacagtacgcttgtgatccagcaggtgcgtggcatcttcgcagcgcgcagcacccggatgagggcgctgcgcaaccaggtgcagtccgagctcgcgcgggtgggcagcttctcgctccaccacatcgacaggcaagacaacgcacacgcggaccgccttgccaatcgcgcgctggacctgcgccggaccgtgatagagtgcggcatccactgtgatggtgttggctgcaccgccaccacgacggaggtacagtcatcatcagcgcccgagataccgacccggccggttgctgacgaccatgatgaacatgaagttgttgatgttgttgatgtttgtggagtttgtggagtttgtggcgaccgtggaacttgtggagtctgtgacgttagtggagatatcgatgatggcgaggtctacgcagccatgcgtacgggacctgacgctgttcctgcgcgccgaccacgcctccgcttgcggaaactcactgacgaagagcaagaagaggcaggcacgctggcggaacggcttggagcgacgctggcggccaagattgcagacgcacgcgactgggagtcggcggagggatacatcacagccctcccttatctactctacgacaaattgttgccgtactcccagggcccagctcgctccttgccggtccgccagcaccaacggcagcagcagcagccggacggacaattccagcgacccacccagtcccgatctgcggctcgtcgacagcgacgccagcgccaccgggcacgtcgccgaccgccacgcgtgactcgtcaccaccgtgaacaccgactagacgaagcgcttgacgacctccacgcggtggagagagctacgcccagcgaccgccgctccattcgccgagcccgccgccgggtcggccgcgttaattcggccgtcgaacaacaacggctccggcaccacttcgatacgaacgagaagggctgcgtggagatcctactggccaaggcgcgtgcacagaggtcgacgacggtggcccggacggcagttggagagccgaacagcggtgcggccgaggacgacggcacgtgccccatcccgagcgagcgccttcaccgccatttcaccgaggtgaacacgcccgggtccagctttgatgcgatggcccccgtgggtgcaccgttccgtgcggcacttgcgcacctccccgcggccacagaggcctcggagctgctgacagaggcgccgacgcccgatgagatcgaggatcagctgcagcgagccaagggaacgaccagccctggcctggacggagtgggctacgacgtctacaaggccttctccacccagttactgccggtgctgcacgcggcattccagtgctgctggcagcaccaccgtgtgccgcagagcaggaagcaaggcatcgtgaggctcctgtacaaaaagggcccgcgcgaagaccccgcgaactggagacctatctgcctccagcaagtgatctacaagacctacgccggggtcctcgcgcggaggtttacgcgctggttggctgcaaacggccgccatgccgacgcccagaaggggttccgcactgtaaatggctgcggtgagcacaattttctcgcgtcgacgctgatcgatcatgcgcgccgcagccgcagagagctccacatggtctggtacgacctgaagaacgccttcggcagcgtgccccaggagttgctgtgggaggtgctgcagcgcatgggtgtcccgccagcctttgtggaggtctgccaggggctgtaccaggatgctgccttcaccgtcggcaacgctgctgacggcccgaccgatctcgtgcggcagctcgtgggcgtgtttcaaggatgcccgctgagcccccacctgttcactgcggcgatcagcccgctcctccacgcgctggaccgactcaaggacacgggcgtgcggctgtcagcggacgaccgtcccggtgcctcggcctacgccgacgacctcaagatcttcagtggcaccgcggacggcgttaagcgacagcacgcgctcgtggccgacttcctgcgctggaccggcatggtggcgaaccccaacaagtgctgcaccatgtcggtccagcgcgacggacgcggcgtgctgaaggcctgcgacctggagctgcagctggacggagcccggatcccctcgctgatcatgaacgcgtcgtacgcgtacctggggacaggcgacggctttgaccacgtgcgccgccgcatcgagctcgtcccggcgctcatgcagctcaaggacgatgcgacggcactgctccagtcggggctggcgccgtgtcaggtggtgaaggcggtgaagacttacctcttcccgcgggtggagtacgcactccgccacctccgcccctttcagcagcaactggaaggctttaatcgccacctcgtttgcggccttcgccacctgctccgacttccggtcagcgccacgaccagcttcttcttcgtgccggtgtcgcgcggcgggctaggcctgttgccactgacggagctgcacgcagctccggctgatcgccgaccggcgccaccgcctagaccccgaccactggaaggagcgggaggagaaaatatgcgagctgcggatcaactcgcagctcgggacgtcggcccacgccccacccaagcgccgcaacggcgacatcggctcgttgtgggtcgacgtccagcgccacctccgaggactcggcctcaagctagagaccgcgccggcgtgcgcggagaccggcaccgcggaggcgacgctgcagcttcgcgtgccgcaccacgagaagtggctggaccaccgcacggtcctgcggcaggtgaagctgcacatgaagaacaagcattggcagcggtgggccgggatgaaggaccaaggcaagaccgcccgcacccatggtggtgcagggagcggcttcctcacgcggcctcgcggcctatgggagaccgactaccgctttgcagtggcgggtcggctcaaccagctggacacgcacagcgtgctgaagcgccggcgcctccgcgcgcacgaccagtgtcgacagccgggctgctcccgtgccgagacactggcacacgtgctgaatcactgcgccggcaccatggacgcggtccgcggccgccacgacgatgcgctcaagaccatcgagcgcgcgctcatcgcgtcgtccgggcggccaggaccgcgccgagctccgggtcaaccagaccgtgccctcgctcgccggccccgcgctgcggcccgacctccagctcttcaaccacaccaagaagacggtggcggtggtcgacctggccgtggcgttcgaggagcaggcgagcgacgacaccgagagctctgcgctggcgcgcatcgccgcgcacaagcgagccaagtacgccggcatcaagcggcacctcgagcgccaagggtggaaggtccacctctcggcgctcgtgtacggctcgttgggcgcggtgatgcccgccaactacaaggtgcttactgagcaccttgggctgctcaagcgtgatgcgaagcggctggaccggcagctgtcggtggcgtgcatccagtccagccgccgcatctggaacctgcactgcgcgcagcatcgagcacggcagcaccagggccaagcgccaaggggcagtcgggcggcggagaccggggggactccgccacagagcggccgccgctaagcggacatcgggcccgtagcggccgacagggccacacccatgtagggaaccgccctctaaacccgcccggtacattatggtccgacacctatgaggtgcaaccggtacacaagttacacaccacatagcgactaccaggtatttactacctggaagccaaggattaaccggtcggtaatacacataacttt

SEQ ID NO: 1084 - DNA, 7375 bp, Ciona intestinalis
  source 1..7375: mol_type = unassigned DNA
atcaacccactactacaccctctacaaagaacccactacagcaagatcttggcgaccaactacacctgcagcctcccgtcgactcttcaccacctgcgcacctccctccgactccaagcggcagacagtggcaccaccagcactccaagggtccacagccagaagagtgcaccccccactgctaggaagagctaggccattgcccgctgtgggccttgtgctggctgtctgccgctgattggcacgttagggagtgtgcgctgagcacgatagggaggctgctgaagccgaagaacccgcgccggggactttaggactttaactaaaatctgtaacactaaaattggaatactggattactattggattactactggacaataacctgatctacaacaaccaattggattacagaaccaaattacaatctcaactacaaacaaaaagtgagtccccggccgggtttctatattacccaattactgtttttacaattttaaaattttatagtattttactaatttttccgccccgctagcacttaaattggcaccccccccccccstccaaaaaaaaatagataaccctccaccacctaaaccccggtcaccccctcagaactaattggaacccggatcttttccctctatcaaatttccggttcagtttggcttaattacctaaaacccgtctttattttatccctttattgccccttaaaccaaattattcaaattgaaatccggccaaattgccttgctgaaccaccatttttgtttttcttataaaagtaaatttttcaacaacccaaaatcataaaattaaaactgttatctgattagtctaaattctgttattgacaaaaacctccataccaaccttaatcttatcattatcttcacccagactgctcaatctagttcttttttcaatcaataaggaggtgttttctttggtctgttgttttatagtttaccgttataatagtctgttgtcctatagttttccgtggtgtatttctggtctactatagttggtgcctctaaaacattattataccgaagagtgctagcgatttctattattaactcacccaccagtactgctgtgcatccacgcagcaccacgcctgccatcacgtacagtgcgcttgctgccttgtgttttgttttgcagacaccactggacgatagatggcgacttcgtcttcctccgtttcatcggggaatgttcagaccgaggtgcgttgcgtctaccacggaaaaggagacttgttgctggaatgcccagttgcccattgccctagcatacaccccacagttgccacaatcacaaaacacttaaaaaaacatcacacacctcaattcgaacagataaccactaaaaatctcacaataacatatacatgcagtcaatgtagtttctccaccaccggtctcacacaacaccacatatccaaacactacaaaacatgcaaaggcgtgggcgctgttcaggaaggcaacaagggtcgattctgctgccctgcatgcggtaccaggtgggctcttttgtgtaaggcacggcaccattttaataatgtccacttcgagtatgacacccctccaattgccgctttctctggcacaccctataaactaaaaaaacggaaatttacaattattaataaggccctaacatattcatgccctctccccctcaaccaactactttgccctttgtggtcgtgctccctcacgatcttaaataaacctctttcaagcgtgcagcaggaaacggcacatggcgacggctcacaaggccagagttatgttccaactcagttgcggcaggtgctcagagcccgttgccactgcggaaaccctccaattggaaagggccactgggcatcttgccaagggaagcgaccactctcttcacctaagggtgggcgcagttcgcccactccacctgctaatctaaccctccacttccttaactatctccccttccaacttccctcacaaagctcctccccccaaagtagcaccctcgaccctacggcctgtaaagctcgagtccccatcccctctttcctacgcggcgactgtgaagtcacctttttcatcatcccctccgttaatttttatagaccctacctctcctaccccctcaggatgttctggcgtaaccgaacatcctccggtcactgttccctacaccgggtcgttcgaggctttgtccgagagcgactcgtcccccatcctcggtcgaaatcgccggcgaggactccccttgaattcctctgcgagttccggctcgcgggggtcttccccgatcctgggaaggtcgcgtcccttcgacccgtaccagctccccttacgctttgcctttctccaccagtcgctggtccaatgatttcctgtgaggaccacagcgcccccccttccgttcgctcgagctcccccattcctaactccccagcctccgtaagctccgtggaggcgcacttgtctgacttgttagacaaagtgtcttccggagaactgcggccgctgtcccccaccctgccttcttcaggcttttttggccctctgttgccacccactccccctccccgacctaccccctcggccgaaaaggcatctccttcaggcctttcctacctaccctgcagagaagtaaaaatcgcgtccattgcacggccatcccctgcctcacagagggtcggctgcgacgcggaccgaacagggccttcgctgaaccctaattatcagcaaacctcccccccgtctactccgagtttctcccccatagttagaccccctaaattcccccggtcgggcgccaaagtaaattccaagtccaaaccccccggcgtccgaccacgccgtgccaagccaattgagccagggaccgagtcggcatcacccgttgatgtcgacactattagtagttcggttcaggaaccttgtactccagaaaacagaaccccggaatttttttatgagcgaaagtggctcgtgagtattttaaatattcacgagcgggagggatccaatttttttcaatttaaccgggatctggagtattggacgcagttgctttcaggctcccagaagggaggacgcgcgaagcgtgcgtcctacaatcgtggtgcggcgaaccaagcgatgaaaaaccgcgattccggccgtaaggatttcgatccccggccggtagcaggccacagtagtggaggtggcaccgagctcggttcgcggccacgataccctaagggcgcacgtcttcgtgccgacttctggagggacatgaaagggacggtccgtaagttacttgatggttcgaacggtgagcgtcgctgcgggattcccctcgatatcatagagcggaaattccggcaagtatccatgcccggctggatagaccacagacggtacgcggccggcgcgtccccgtccctagtaacccaagctgaaacggatgttgccatcaccagtgaggaagttgaggcggtcctcagtggcctaaacgttcagtccgctccgggctcggatggcctctcctatcgattttggaagggcctcgatcctagtggtcgattgttgtcatgccttttcgaaatcgttaggaggcatggtcgtattccgggcgcgtggccgacttgtagcgtcatcctgctctgtaaagatgctcagggtgacgttcaggacgtgggaaactggagaccgatcaccatctgccgcactctgtacaaattgtacgcggctgtgatcgccagacgtattcagacttgggcgaaacagggcggggtgctctcgcggctccagaaagggttcatgccagttgagggtgtgtttgagcacgtcttcatgttggataccgtcctttccgacgccaagctgaggcgcaagaatcttcttgccgtcttccttgacgttcggaatgcgttcggaagcgtccggcatgaatgcttgctcaaagttcttcggcacttcgatgctccccattacctggttgaactcgtgagggatatttacaccggtgcgacctgccgtgttagatcttcggttggtgagaccggtgatataccctgtgatcgaggtgtcaggcagggctatcccctgtctggcattcttttcaacctggtaacggaggtgctaataccggggctcagtgccgggaatgatggctaccggatggcttgcttaggtggtaagctcactcaagtcctggcctacgctgacgatctggtggtagtcacggaaaaccgtgatcagatgctacgtcagctgggtgtgtgtgaggaattcggccgttgggcaggccttgcattcaatcaacggaagtgtggcctgatcggctggaggacgttgcggggagggaggagggtcgcactggaggatcctctgctccttaacggagtagagatccccctgttgcggcccggtgaacactataaataccttggcgccatgactggcgtcatgagtgttccccgcaccggatcccagctgatcaaggacttccgtgcaaggctccaacgactgtttacatcgttcctcacaccacaccagaagctgatcgctctgaaacggtttctgctgccaagtctcagctttcatctgagggttcgtccgattgcgcggtctgagctgatcgcgctcgaccgtcgcgtgcgcgagtgccttagggtggcgtttcgcttgaccaagccctcgtgtcaggctgtgtttcatacaccgactgacatggatggtctgggtgtcccgtcggtatgcagtgagagcagcatactgacgatcgcccaggggttcaaggtgttaacgtcacccgacggcacagtgtccgcgacggcttcggcgcgcgtgaagctctacgccgctaaatttggcggcctcactgaagcaggtccttcggactgggcgcgttatctatctggtgatgacgtcaacgggaatagcactcgcaaacccggcgctaacctgccttctggtctgtggactcgcgtccgctgtgccagcaggcagttaggtgctgtgtggcgcgtttgcccggaaaacggcatcactgtccgggtgcgtaattctgtgattacctcccgagaccgacggaagctcatcagatccttccacgattgctctaatcagcagtggaaggagcagtggatgcagcaccccaaccaggagaagaccgctgcagcgcatatggcttatgccgatgcgaaccgctgggtgaagcagccgtcggttatggaacctcatacatacttttttgcattgagggcgcgcttgaacctgttacccactagggtttcacgagctatttatagcagggaccaacacccggacattttatgccgacgttgtggtgcgtcagttgagtccctcccgcatgtactaaaccattgtcctcccaatatgagcataatactcgggaggcataatttggtactgcaggaggttctgaacgcggtagacaaaacccagttcaaagagatatccgttgaccgaacggtccccgagcacatgtcggagacaggtgaggccttgcggcctgacatagtggcacggcggaatgacggttccgtcgtggtcgtcgacgtggcttgcccgttcgatcaaaaggcgaactttgatgaggcggcaaaacggaagctcctaaagtacgacaagctttgttgcaatatcgctgcctccacaggtaaacctgtggagtgtcattcgatagtcgtgggctccttggggagcctcgcggagggtctgtccacctccctccgggctttgggaataaccgattttgctcgctctaagcttgtcgcttgccatcaagggtagccaaaagatttggtgttcttggcgagctgcagtcccggcagagtaggcgagatcgtgagctctacaccgcttcacgatttgacgagttcttcttgagtcgatccccaacggcaacgcactccaaatttaacgaccgcatggcgacgccactgatctcccagtcatccgtgctccgagggcacttaaggggaaccgattcactgatgctgcaagttggcgggggcgcactcaccaatggaagatgagggagcccaacgatgccccgaactaccgcaccgtccccagcaccgtgtccttgtgagtaattattttcactaatccagggacggggccatgaactgaactatgtctgcacgctgccccgcctagcctcggccacaaataaatagtcaagccggggcgtactaccaattgattcggatttggcggggcccatcacgcgcctccgcccccacacacaaaaacacttttaaactcttcggttccccaaccactacaacaaagcgagcggcccctcttagatccaattttaaaattttaaatcagtgcactcaacttttttacgtgttgtgttttttgtattttttcccacagattttgtatttttatattatattttatatacacaacactatttttatacactaccttgcactgtcccactttttgtaattatcaccttttaccttttatgccgctcgctgagctccttgcacggatgaccagacaaacttttataaaattataacattgttttaattgtcgcggggtatcagtggcgcccccttgcggccgtgaaagcccttttcaccttaattcgccccttagtccaaatttttccccattgcctgtaaaagtgcgttgccgtcgactcgaactcgtcctttttaccgcctctctgttactgaactatgaccagcttggctgttgaagtcggctttaattcgccggcttcacattatatttttttgttgggtaatctgttttttttcatatataaaaccattcggcttaaaatcaccaatccccatcatccaccctggtcacccattgaaacatctctttttagtcaattattttttcagattacccctcccaaattgtcatatagtttaacaccccgtttgccaagttggtcttttccccatccccttctgtccttccggtaatcccataacattttattctttaattcggccccataaatagtgtaatcttaagacgaagtccccagaggcccggtcccccccttctttgtcatggaccgggccagcccccctgttaccacaacaacccaccattttattctttctttctttttattagtatttatttatattgccgcccaactgtcgtgtcgtggcgcaggggggttccctctgtcggcccagtggacgaccgtctaaaaaacaggcacaggcagcaggcacttatcacccggtacctccgggtaccggaggctggttttcagcgcactgtacgtgatggccaattttattcattgcattttatccgcgtcgtggtgtttgcgtggatgcattaataaaagatgaaattcc

SEQ ID NO: 1085 - DNA, 4394 bp, Schistosoma mansoni
  source 1..4394: mol_type = unassigned DNA
  misc_difference 137: note = a, c, t, g, unknown or other
atctcacgttttaatttatttttgaactactgcagtctgagtgcttctaacgacccgaaggctcagaaactacccacttcttgaactgctactttttgctgtttatccacaacaacagttgtgattctattctccanatattccttgtgcttttgtcaacattattctataccaactgtaccacctacttcttcatctcacgttttaattctggtcttattttctcatcattagtcacggagagggcctatgaacggtccgtgacgcgaaattctatccgcgatttcgacctctcctgctagtggtccccgaagtacggttcctctggcctgtcagttgtgttaaaactatataataacgatgccggtctcaaccggcgcagaaactgacataacctcttctttgcctattcctgcatcctcaatcgtctcgccaaactacacactccctgattcctcttcaacctgccttatatgtttcgctatcttccccacccacaacatactcctctcccatgccactgcaatccaccatatttcttgtcctcctactccagtgcaagacggttctcagcagatgtcttgtgttctttgcgccgccgctttttcatctaacaggggactaacacaacacattcgccaccggcacatctccgaatataacgaactaatcagacaacgaattgcagtgcagccgacgtctcgcatatggtcaccattcgatgatgcttctttactatccatcgctaaccatgaagcccatagattccccacgaagaatgacctatgccaacatatcagcaccatactaacacgcaggacggcagaagccgtcaaacgccgactcctccacctacagtggtcgagatcaccaacagcgattactacctcttcgaataatcacacaatcacagacatccccaataccgaggcccgatatatttttccggtagacctagacgaacatccaccattgtctgatgccacaacccccaacgcatcgacacatccactcccagaactccttgtcatcttgacaccgcttccatccccgactagactacaaaacatatccgaatcacagacctcccatgaatctaataagaactcaatgcatacaccgccaacgtatgcctgcgatccggatgagacactaggggctactccctcatcaactattccctcatgcttccacagttatcaggaccccctagctgaacaaagaggcaaactcctgagggcatccgccagcctactacaaagcagttgtactcgcatacggtcctccagcctgctcgccttcctccaaaacgaatccacattaatggacgaggaacacgtgtccaccttcctcaatagtcatgcagaattcgtcttccctagaacatggaccccatcccgacccaaacacccctcccacgccccagctaatgtttctaggaagaaaaggaggaaaatagagtacgcacacatccagagactcttccaccaccgtcccaaagatgcctccaacaccgttctagacggtcggtggagaaacccctatgtcgcaaaccattcaatgattccagacttcgactgcttctggacaacagtctttactaaaacaaattccccagacagccgggagattactccaatcatccctatgactccctctctcattgacccgatcctcccctctgacgtcacatgggcgctgaaagaaatgcatggcacggccggtgggattgatcgtctgacatcgtacgatctgatgagattcgggaagaatggtcttgctggatatctcaacatgctactcgctcttgcataccttcccactaatctttcaacagcacgggtaactttcgtccccaagtcatcaagtcctgtgtcacctgaggacttccgtcccatcagtgtcgctccagtagccactaggtgcctgcacaaaattctagctaagagatggatgccgctctttccacaggaacgacttcagttcgctttcctaaaccgagatggatgctttgaagcagttaatcttctgcactcggtcatacggcacgtccacacccgccatacaggagcatccttcgccctgctcgacatatcacgggcctttgacactgtatcacatgactccatcatcagagcggcgaaaagatatggggcacctgaactgttatgccgctacctcaataactattaccgacgttcaaccagctgcgtcaaccgcactgaattgcatcctacgtgtggggtgaagcaaggagaccccctgtcgccactcctcttcatcatggttctcgacgaagtactggaaggtctagatccaatgacccacctaacagttgatggagagagcttgaactacatagcttatgctgacgatctcgtagttttcgctccaaatgcggaactccttcaacggaaactcgatcggatctccatacttctacacgaggctggatggtcggttaaccctgaaaaaagccggaccctggacctaatctctggtggccattccaaaatcacagcgctctctcagacagaattcaccatcgcggggatgcgtataccaccgctttctgccgccgacaccttcgactacctgggtatcaaattcaacttcaagggccgatgcccagtggcccatattgacttattgaacaactacctcacggaaatatcgtgcgctccacttaagccgcagcagcgcatgaagatcttgaaagataatctactccctcgactcctataccccctgactctaggaatagtacacctgaaaaccctgaagtcaatggaccgaaatatccacacggccataaggaaatggttgcggctaccctccgacaccccgctagcatattttcactcacccgtcgctgccggaggcctagggatcctccatctgtcctcatcggttccattccaccgtcgaaaacgtctagaaaccctcctatcttcaccgaaccgcctactgcacaagttgccaacttccccaacactagcttcttattcacaccttagtcaactgccagttcgaattgggcacgagaccgtaacgtctagagaagaggcttccaacagctgggtgagacgattacattcgtcctgcgacgggaagggactactcctagcaccactaagcaccgagtcccatgcatggctgcgctacccccagtctatttttccatctgtttacatcaacgccgttaaattacgaggtggcttactatccaccaaagtcaggagatctcgcggaggtagagtgacgaatggcctgaactgtcgaggcggttgcgcccatcatgaaacgatccaccacattctgcaacattgcgcgctcacccacgacatcagatgcaaacgccataacgaactatgcaaccttgtggcaaagaaactgcgtaggcaaaaaatccatttcttacaggagccctgcattcctctagaaaaaacctactgcaaacctgattttataattatacgtgactcaattgcttatgttctagacgtcactgtatcggacgacggaaacacccacgccagccgcctgttaaaaatatcaaaatacggcaatgagcgaaccgtcgcgtcgatcaagcgtttcctcacatccagtggatatatcattaccagtgttcgacaaacaccagtcgtccttacattcagaggtattctggatagagcaagttcacaatccctacgacgcctatgtttttcatcccgtgacctcggtgacctttgcctgagtgcgattcaaggctcaattaaaatatataatacctatatgagaggaacctaacggctgaacgaatagcccccttcactcttagacattcccccactgttgttgcttatcttcatgctcttgtgttaattgactgctctcttctgggttgacgtctgattgtctctctctctttccatattgcttgctctgcccgcttacttccaatagttgtcatattatgtctttgtttacttgccatgtctaacgacaattactttatctaccttagtttgtcctcttggtttcgattgccttcatatgttcatggcggaatctgatgtttataatgactattcctattaccaccactacaactactattattattttcattactattaacattattataaacattattactattattattattactattattacttctacaattaatattatggctactcctctcagcacaccaataaaatatcaatcaaacatctcaattatatccacctattaaactctctctatttcccctgagttataaacttacaattcagtctaaccgaatatctctcttttacaaatcttaagtatgtaattttgtgccaaacccatttgggtctgtacaatttgatacttaaaaataaatgttattagcc

SEQ ID NO: 1086 - DNA, 3818 bp, Bombus terrestris
  source 1..3818: mol_type = unassigned DNA
  misc_difference 470: note = a, c, t, g, unknown or other
  misc_difference 508: note = a, c, t, g, unknown or other
  misc_difference 598: note = a, c, t, g, unknown or other
  misc_difference 605: note = a, c, t, g, unknown or other
  misc_difference 698: note = a, c, t, g, unknown or other
  misc_difference 846: note = a, c, t, g, unknown or other
  misc_difference 847: note = a, c, t, g, unknown or other
  misc_difference 929: note = a, c, t, g, unknown or other
  misc_difference 938: note = a, c, t, g, unknown or other
  misc_difference 944: note = a, c, t, g, unknown or other
  misc_difference 947: note = a, c, t, g, unknown or other
  misc_difference 982: note = a, c, t, g, unknown or other
tcaatagttactcgggggcaggcgggatattggtcttgccttgcccaagtcacactcctacctcctcgtggtaccgccggtaacacgcgcacgtccacatcagcgaggggcgtactcccccggatgtggcggcgcgtggctaaacggagtgtggcgacgaaggagcgaaagactaacaactataacggtcttccgtaacggctacttggagccgtgaataatggagcctatattaaaccctggaactcgttccttcgttctgttgacgactggaacggcaaaggacatgatttggataacaattggaaacttaatatcgaattcacaattaaattgcaaaattcgataataatacgaatagtgcctcggacgcagcgcctctcagtcccggaggcgctgtggcggatttatccgcttcagaggggactacggataacgaccaggctatgtccccggctatgagtttgatnacggtgccgctcgtgggcaatcgggtcgcctgtccagnatgtgagaaaagggaggctaaccttttcttcttaaatctgtcggacctggacaggcacctaacacaacaccacccggatgccccgatctnttggtcntgtatcgactgcgcgaaatgcttcccgaagcttcatggggctagatgccacatacctaagtgtggtggcgctagcagccaggccaggacaggngagttccagtgcgaggcctgtcccatgagcttcgggtcgcgcagagggctatccacccacgaacggcatgcgcaccctgccgtcagaaatattaaaagaaggggagcggaccccccagaagaaaatacaaaatcttggaaagtagaannggtagcacgcttgaaggggctatgggaaatattcaaagaccataaatatcccaacaaagaaatcagcaaattcctcaccacnaaaacggtngatcanatnaaatatcaaagaaaaaagctaaacttaattggtgnggaaagcccccaagaggctacctcactggcaacagagggagggtgcgatctcgttagttcaggcaatgccagttttggctcgcctgtaggccgcaacgagaacgaagaagagctcatccacgaatggaagctctcgctaaaaaacgaaataaataagccaaccgaggtgccccctattttaaaggaggtttacaatcggctgatgttaatctgggaagagcaccaagatgatcgagactctctaacggagagtctcgatcactttatacgcacagctctatacgagcttataaacaaaataaataaaaaccaaacggatttaaaaactaaaagagcagctaaaacaaaaagcccaaaaaataatagaaactccaggaagcgattctcatacgctcgttgccaggagttatttcacgaatgcccaaggagactggctgatgccgtggtcaataacgatcaggcatatctcgaaccagccaggcaacctcccggatcagaggaagtgagggggctctacgaaaagctgtggggacaagtgggttccacgtacgtcccggctccagttacgagagtccccaaactatccctatccgagatcttcccgccgatagcggctgaggatgtgggggagagaatcggcaaaataagaaagaaagctgcggcaggaccggatggattacaaagagatcacctaactatccccggcctgcctatcataatggcgaaaatctataatatactcgtatattgttcttattttccctccgcatggaaggagaatagaacaactcttattccaaaaataaataagccatgcagcctggtcgagaactggcgaccaattactattagtccgattctaggccgaatcttctcctccattatcgacgggaggataagaagaggcactgtattaaatatgaggcagaagggctttacatctgaaaacggatgtaaaattaacatcgaattattaaattctgccttaaactatagtaaaagaaatagcggcgggatattcactatcgtggatatctcgaaagtttttgatacagtgcctcatgcagccttaaaaccttgtctggcaaaaaagggtgtgcccgcccttatcgtcgatttgatcgacgaaatgtataaaaacgtaaaaactactataaaaactaaagatggcggggtcgagattatgatccgccgaggagttaagcaaggcgaccccctatcgcccttactcttcaatttatgcttggagccactgctggaagagatcgaggagcaagccagtggaataaatgttagcgaacatcgtaaagtatcagttctggccttcgcagacgatatcgttctacttggagcggacgcgagggaagcgcaacaccaaataaacgtacttaccgactacctgcaaagcctcatgatgaatctatcaattgaaaaatgccaaaccttcgaggttgtggccaaaaaggatacctggttcattaaggaacctggacttaaaatcgggaatcaaataatgcctactgtagatcccgacgaggctttcaaatacctgggcgccaaaattggtccctggaaaggcgttcattgtggtgtaattgttccagaacttctgagcgtggtgaaaagggtgaggaaactctccctcaagccgggccagaaggtggaacttctaactaaatacatcttcccccgctacatttaccatctacttgtaagtccgccaagcgataccgtccttaaactactagacagcgaggtcagacaagaagttaaaactatcttacatcttgtgccttccactgccacaggcttcttttacactccaaaggcctgtggaggaataggaataccgaggtttgaacatataatcaaactcggtacccttaaaagtgcaataaaaatcgcaaactcgatcgatccagcggtcgctggcctaatcgatgatgcagccataaaaaagttaaagcaaacggccaactccttgcggatcaattggccagcctccttggaggatattgaaaaagctcgtaaacgtctaaggaaagagcatatcagccaatgggctgatttaaaatgccagggacaaggcgttcctgattttatcaaaaataaaactggcaacctgtggcttgaggaccatagtctactcaagccatcgagactcatcgatgcccttcgattaagaacaaatacctttggtacaagatcggtgctggcacgggccgacaaaaatattgatgtaacatgtcgaagatgtcgtgcccagcccgagacccttggacacatactcgggctatgtcagcacactaaaggcttaagaatcaaaaggcacgatgaggttaaatccctcctcgaaggaagattaaaaagtaaaaagaacaacgaagtatttgtagagccgacgattaaggccggaggcagtttatttaaaccagacctcgtaattaaaaacggggaaagggttctcgtggtcgacgtaactgtccgctacgagaacaaaaactacctggccttagccgaaaaagaaaagatagagaagtatcggccatgcctaagggcattaaaagaaatatttaacgccaaaggaggagagattcttccggtggtcttgggtagtagaggcactatcacgcctaacaccgagaaagtcctcaagcgattgggaatcgctaacaatgatataaagacaatactcttaaatgtattaagaagctcgatagagctgtgtaatatattcattgatgactgaaaacacgataacgattatgaatcaaaataagaaagtaaacatcccagaaattgtctacgtcttatttgttatctatttatttgttta

SEQ ID NO: 1087 - DNA, 5699 bp, Crocodylus porosus
  source 1..5699: mol_type = unassigned DNA
aggcgtctcctttaagggcaacggtctggttacgcggtcgcagcagkcttgckccaggtacctccwcgtggttcccgccgggtgccgmagmcccaggsctgtcggtagctcgatcctggcacagtamggccaggggagtkcttccttgctgcwggtgccccacaagcgtktggcagsmcmcctgcttcwtcgcaamaatmasagkgtsmtcagtagtcggccccgccgctagccaaaactgttcgccacscagttacagatggtgcctgtgctgacckgkkgccccgtgggctcggwggtgcaggggwggccggcccatggctgggccagacstgggccktggagcccgctcccamcccagagttccccctcaamgccgccaggkcagmamcakccggggagkgmcacggccccggccgtgagtcccccccggtgcwgaggcccggggccgataccaccacccccggtgmgagmgcgcccgccagggtgaaccaccctccamcagggttttcctggtgasgctgcctgactcaaaccckccgtgcccgatttgcggggaccacgtgsgtwaacwctccgtgctggccctccactgcgtggagggccacgwgtgggcgsatgtgcagtaccagtgcacccattgtggcatcctctgccacatcccacgttgccaggggagggtgcmkgagcwgaccgggaaggactkggmttgtcctgagtgccctgcctccttcgatgagaaagcwggcctatcgcagcacaagcggcacacggtaacacamagtgwkgaacgggttgcaggkwacctgttgagggctkgtttaaggcacgggtgctggtcggtggaagaagaggaaactctcacccgcctwgacgcgatgttccstggcgcccggaacatcaaccagctgatcgctgctgagmtggtwtcgaagatgcstaagcagatcagcgacaaatggaggtwgctckstctgwgtcctgagcagaccacatwgggtggtgakgctgagtckgcctccgtggtgsaggwwgagtccatgactccggagatggaagcccaaagcccagctgamccgcctgggaaaatcaggaagattttcactggacaagatgggcacgccggtggctgaagagggggcaggktctgtcagacaaggtgcaagaagtcctgggckcgtgggtggagggtcaacccaggattcmtgcctgggtcgackcmgtctcccttgatgttttgactttgttcttgggggtgcccccgggaccgcagagggctccgagcaagaaggggcccamggagggtggcaaaccwacgtcctggatgaacaaacgtgccatcaaatggggcacattccttcggtaccagcacctgtttggtgccaacaggaagctcctggcggccmtcatcctggatggtgctgascgtaatcagtgsaccctcctgctwgaggaggtcttkcaggmctacckaggaaagtgggaggccgagccgcctttcgagggtcttggacggtttgggstccammgggatgtggatagcttcgcattcgaggccctgatcactckggaggaggctgtcaagcacatgatggmaatggccwmsaamtcggctccaggtccggataagctcaccctgagagatctgcgccgcgckgaccccgagggagatgctcttgccgaactgttcagcctgtggmtgatcactggcgtggtcccggacagactcaaggagtktcagtstgtgctgataccaaaggcagtggactttgagaagctgaggcagctgggcaactggcgccccatcactatcgsgtccattgtkttgcagctattmtcacgggtgctgaccgcacggctcaccgcagcwtgccccataascccccaccagcagggkttcatmtcggcacckkggtgtgccgaaaacctgaagmtgcctgagctcatcttscgsaaggtgaagcamgacaggcggccgctgggggtggcattcgtggatmtagcsagggcsttcgactcggtatcgcacgacmacatttcwtgggtcctaaaggccaaaggggtggaccaacacatcgtgaatctcatwgaagattcataccagaaggttaccatgagagtacaagtgttcagtggttccaccccwcccatcagcatcaaawccggggtcaagcaaggcgacccgatgtcmcccctsttgttcaacattgcgatggaccccctgatagscaagctcaagacagtcaggcagggagtgaaagtcgggagtgcttccctgaccaccctggcatttgcggatggcctcgwmctgctgaktgactcctgggagggcatgcaacacaacatcacgacatcctagaggacttctgcaacctcacgggcctacgagtgcaacccamaaaatgkcaggggttcttcttgaatccgamatgcgactcctwtacggtgaacaactgcgmggcctggaagatwgccggccgtgmsatcacgatgctsgggccaggcgagccgacacgatatctgggcttgaakgtcggtccctgggttgggatwggcaaaccagatttgggtacgcaactaakctcctggctcgagaggatggggactgccwcgctcaaaccaatgcagaagctctttgctggtscagtatkccattcccaggctgcgctmtcaggccgwtttatgcgaacmccggttgggtggcctcggaggctctggattccatgagccgaagaaakgtgaaggagtggttccacctacccgcctgtaccgackgcctcctccastcccgccaccgggatgggggcctkgggttgctgcgcctggcgagagmcwttctggcagcgsaagtgaggaggccgattcgtgtagccacctcatctgatgaagtcacgcggaaagtatcctacgcatgtgggataagtgatgaagtggagcgkctctgkttggcmagwgggggagacatstccaatgtcccgaggttcgaggatcctgawgccccgaagtctscakgggtgcagggcccccatgaggctgcccaggagacaccacgtgttgtccggacacaggcgatcccctggccctccaactggagagccgaggaacactccaaatgggcccaactcagctgtcagggagagagggtggagttattctgcaatgatccagtcagcaatggctggatcaacagtcggggacaactggcggaacgcctctggatcatggccttaaaactgcgttcgaacatttatcccaccagggagtttcttgggagaggccaggcaggtaccaacataggttgccggcactgtacacaccctcgtgaaacattagggcatatcctgggcatatgtcctgccatgcaggaggcacggatcctccggcacaacaagctgtgcaagatcctggcagctgagggcaaaaactgtgagtggacagtgtattatgagccgcacctacataacgcagctggggaactgcgtaaacctgacctcatttttgtccgagacggtaccgctctggttgtggatatcactgtgtggtatgaagggggccccgcaaccctcctgtccaccactgcagaaaaggccacaaaatacctggatctgaacacacagatccaggagctcacaggggctgagcaggtcacctactttggcttccctataggagccaggggaaagtggcatgctgacaattggcgagtactgtctgaactgggattgtccaactcccggaaggagcgggtcacacggctcctgtcgtggcgagcactgctcgggtcagtggacatggtgaacatctttgtatctaaacacaggcaggaaaacctattggatgagcactgcaccccagctgagcaagttgtgagttcttatgcgagttgaatcccactctggggacccccaaaaattagaaaaacccaaaacagttgtgtttaagtgtgttcttgtttgtccctttggcttcacctccaagttgcgatcccccatctcccctgcgctgtctttctgaatgaccagtggtgttgaggctggtgtgacctcggtcacctccaaggccaagtgccctggccccgagtaggaccaggtggcccagcttgctgggcacccgtcaccgcccagggcaaatggaagggatctatcctgaccactaccaggctaagtgtggtgctgcctagcctgccgtaaggtcaagcgccctgctgccgctcgggtakcagtcctcgttcactcgtccctcctagtaccctccgcmtctgcgcttctgctatccactgtggccggwgatgccgaggwtgswmcawcctcgacacctccagggccaagcgccttggccmcaggtaggacctggcacctgcccagggggccagacactgcctgcggcaagggaaagggagccgtccctgaccgttaccgggcttgatggtgctggctagcccgccgtatgtcaagcactccacagctgctcgagttcgctggcttcaccttcatcccwcctagtgccttccgcctctgcgctattttcgtcccgactcgtacctccccacctctgcgctacmgctatccctgmaaggaccaagtgggcaggggsgttcgccccccgcccgcaggaggctcggcgtatccgtggcktcwtgcctccaccgtcttgtgccgctagaggggtacctcmgagaccggcgcaacacgaccttgacgsttagacagtagggtgmaacakccctgctgcaggcstgaagggccaaacggctgtgccatgagaggggaaccttgaagaccgggscagtcagccagttagtcagttgggcgaaacaatcccagctgcaggcccammagggctgtcaggtgagggggtatccccawccaccccccgccgccgactacggaggcakgaagtccctagtgacttckgacccccacgtcttgtgccgggagaggggaaccttgaagatcggggcaagccgcacttgatagttagccagtckggtgaaacaatcccagctgcgggtccgaaagggccgactwccaggcgaggggggcctgcggaaamccccctccatggtacggagktctggcgtcctmaccgacwccttgccaccaacgtcttgtgccgggagaggggaaccttgaagatcgggscaagctgcacttgatggttagtcagtcgggtgaaataatcccagcwgcccccgctgtgactgctaagmcwggtccccaaggggcatgaggcatstgcgctgagccggsaggggtgacacmcggcgatcggcgcagcacakastgaagggaggcacttgctgagactgcttctgaggccccagacttggggtggtgcagccttgtctggggtatggtacagcaccctactgctccctttggkcagcagaattcgtcccgacctcttacccacccgagtctgcgccttgttccgctatcctgcatctccgatccacctcgctgtctccccgctgcgctgcttttctctcaagtgggttaaatcttgtcatgattacctcccacgtttccgctcaagggcaatgcccaamatgacggggatcgctggtgcatggcagtcatgagaccatccggaccctccggtggtcgctatagtcattttktgttgcatggggcatsctgagtcacttaaccgaaagactcwaaataactcaaaagaggkamcctctgsggttcggtaaa

SEQ ID NO: 1088 - DNA, 3550 bp, Drosophila willistoni
  source 1..3550: mol_type = unassigned DNA
gaagctgggtcggatgagcgcagaaggggtgttctttggaacactgtaattcataagtcgtaagtctgatcaagtcgactcgaaacctcctcgtggtgtttcctgggtgctgttgagttcctagtctctaggttcttttcagtagctaattcgagcggcgaagcaactcttggggttaccggccccttgagccaagaagcgttggtacagaatcaaataataatagtcctcggagcaatatcactatcacttcagcgacttcacgtcctggagaccaaccgagagaggctatagcagtggtaaatctcgcgggagagattccctgtgcagtatgcgggcgcctcttcaatactagaagggggctcggtgtacacatgtcacatcaacacaaagacgaactagatacgcaacgtcagcgtgaagatgtaaaactccgatggagcgaggaagaagcgtggatgatggcgagaaaggaggtggagctcgaagcaagtggtaatttgagatttcctaataagaagctagcggaagtatttactcaccgtagctccgaagcaattaaatgttttcggaagaggggtgaatataaggcaaaactggagcagatcagagggcaatctactcccaccccagaagcgttggactctattacctcacagcctcgccctagtttactcgagcgaaaccaccaagtatcatcgtcggaagcgcaaccaatcaatccatcagaagaacagtcgaactgggaaatcatgcggatactacagggctatcgccccgtagaatgtagtccccggtggagagcccaggtcttgcaaactatcgtagatagggcgcaggccgtagggaaggaaaccactctccaatgcttatccaactatctcctggaagtatttccattaccaaacgaaccacacaccatcggtcggagcaatttgcgaagacctcgaactaggagacagttaagacaacaagagtacgcacaggttcagcgtcgttgggataagaatactgggagatgcattaaatccttgcttgatggaacagatgagtcggttatgccaaaccaagagataatggaaccctattggaaacaagtaatgacgaatcccagcacatgctcttgcgataacacaagattccgtatggaacattcgcttgagacggtttggtcagcgataacgccacgcgacctgagggaaaataagttaaagttgtcaagtgctccgggtcctgacggtatcactccaagaacagccaggagtgtacccttaggcattatgctacgcataatgaacctgattctctggtgcggcaaaataccattctctacccgactggccagaactatcttcattccgaagactgtgacggcaaatcgaccgcaagactttcgtccaataacagtcccctcggttttggtcaggcaattaaacgctgttctggcttctcgattggcttctaaagtcaactgggatccaaggcagcgcggtttcctacctaccgatgggtgtgctgataatgcgacgttggttgatctcattttgcgggagcaccataaacggtggaagtcatgttaccttgcgacggtggatgtcagcaaggcttttgactcagtatcacaccaggccattatcaagactttacaggcctatggtgctccaacaaactttgtcagcttcatagaagaacagtataagggcggcggaacctccctcaatggggcaggatggagttcagaggtgtttatacccgcgcggggcgttaagcaaggtgaccctctgtctccactattatttaatcttatcattgatagattacttaggtcctaccccagagagattggtgccaaagtcggaaataccatgacaagcgcggcagcgttcgcggatgatctggtgctatttgcggaaactccgatggggcttcaaacattgttggataccacggtaggcttcctagcctccgtgggactctcccttaatgctgataagtgcttcactgtcagtataaaggggcaagccaagcagaagtgtactgtcgtagaacgacggagcttttgtgtaggtgagcgcgagtgtccttcattgaagcgtactgaagagtggaagtatttaggtatccggttcactgcggatgggcgggctcggtatagtccagcagacgacctcggtccgaagctgttaagattaacaagagcccctctgaaaccacaacagaagttatttgcacttaggactgtccttatcccacaactctatcaccaactaacacttgggagtgtgatgataggcgtcctaagaaaatgtgacagattggtacggcaattcgtaaggagatggttagatctcccactggatgtaccagttgcttactttcacgccccccacacttgtgggggtctcgggattccgtcaattagatggatagcaccgatgctgcgtctgaagcgattgagcaatattaaatggccccacctcgaacaatccgaggtagctagctctttcattgacgacgaattgcaaagggctcgagatagattaaaggcggaaaatgtgcagctgtgttcgcgtccagagattgactcgtatttcgcaaatagattgtacatgtctgttgatggttgcggtctccgtgaagcaggtcattatggcccgcaacatggatgggtgagtcagcccacgcgcttgctaacaggaaaggaatatttgcacggtgtcaaattgcggataaatgccctaccctcgaagtctcgtacgacgaggggaaggcacgaattggagagacggtgtcgtgcaggatgtgatgctcccgagacaacaaaccacatcttgcaaaaatgctatcgtacgcatgggaggcgggtagctagacacaacagcgtagtaaatgccgtcaagcggggacttgaacggaaaggctgcgttgtccatgtcgaaccaagtctgcaatgcgactcgggcttaaataaaccggacctggtgggaatccgacagaatcacatttatgtgatagacgttcaggttgtgacagacggacattccttagaccaagcgcaccagcgcaaggtcgaaaggtacgacagagctgacataagatcacaaatgcggcgatttttcggagcgacaggtgaaatcgagtttcattccgttacactcaactggagaggaatctggagtggtcagtcggtaaaacgattgattgcaaaggatctcctcatcgctgaagataccaaactcatcagcgtcagagcagtaaatggcggagtgacgtccttcaaatatttcatgtattgtgctgggtatactcgaagctagatgtactaacctctagcttttcttatacttttgcctgctaccttggcattacatctaaaaaggtacaaacatcgcattgtcataaagaggtggttttagtacgtaggcgctgtgggacttcattgtcccggtgatgcagtgaatcgtgcatacgagattgtccagtagttggttgctcgtatctttagaagatttccttcctcggcgatcaaaaaaaaaaaaaaaaaaaaaaa

SEQ ID NO: 1089 - DNA, 5974 bp, Gavialis gangeticus
  source 1..5974: mol_type = unassigned DNA
aggcatctccttkaagggtaatggtctggttacatggtcatagcaggtttgtgtcaggtacctcccagtggttcccgccgggtgscamagccccagggctgtcggtagctcgatcctggtacagtacggccaagggagttcttccttgctgtcgggtgcctcgcaagcacktggcagccccaatcgcttcattgcgaaaaacacaaacgtcctaaggggatgatcagctagtcagttctgccgctagccaaaactgtttgccacccagttacagatagcgtctgtgctgaccagctgccccgcgggcttggggtgcagtggaggccggcccgtggccaggccggacacgggccgtggagcctgctcccagtccagagagttccccctcggaagctgccagggcagcaccagccggggagggccacggccccggtcatgagtccccctcggtgcagaggcctgaggccgataccactgcccctggtgtgagcgcgcccaccagggagggtgaaccaccctccaccagggttttcctggtgaggctgcctgattcaaacccgccgtgcccaatttgcagggaccatgtgggtaaaccctccgcgctggccctccactgcgtggagagccatgcgtgggcggatgtgcaataccagtgcacccattgcaaaaaggtcagtgctaacaaacacagcatcctctgccacatcccatgttgccaggggagggtgcccgagtggaccgggaaggactgggcttgtcctgagtgccctgcctccttcaataagaaagttggcctatcgcagcacaagcggcacgtgcatccggtaacacgtaatgtggaacgggttgcagggagcctatcgagggctggtttaaggccccagaccagacgcgggtgctggtcggtggaagaagaggaaactctcacctgcctagacgcgatgttccgtggtgcccggaacatcaaccagctgatcgctgctgaaatggtaacgaagatgcctaagcagatcagtgacaaacggaggcagctcggtctgtgtcctgagcagaccacattgggtggtgatgctgaatcgacctccgtggtggaggaagagtccatgactccggagatggaaacccaaagcccaattaacccgcctgggaaaatcaggaagatcctggcccagagggcacgccggtggctgaagaaggggcagggtctgtcggacaaggtgcgagaagtcctgggcgcatgggtggagggtcaacccaggattcatgcctgggtcgactcagtctcccttgatgttttgactttgttcttgggggtgccctcaggaccgcagagggctccgaacaagaagaggcccaaggagggtggcaaaccaacgtcctggatgaacaaatgtgccgtcaaatggggcacattccttcggtaccagcacctgtttggtgccaacaggaagctcctggtggcsatcgtcctggacggcgctgaccgtaatcagtgcaccctcctgctagaggaggtcttccaggcctaccgagaaaagtgggggctagaggaagtccttcgggcctaccgaggaaagtgggaggtagagtcatcttttgagggtctcggacggttcggggtccgccgggatgcggataacttcgcattcaaggccctgatcactcctgaggaggttgtcaaacacatgatggcaatggcctcgaaatcggctccaggtccggataagctcaccctgagagatctgcgccgcgctgaccccgagggagatgctcttgccgaactcttcagcctgtggctgattaccggcacggtcccggacggactcaaggagtgtcggtctgtgttgatacccaaaacggtggaccgggagaagttgggccagctgggcaactggcgccctatcacgattgggtccatcgttttacggctattctcacgagtgctaaccgcacggctcgccgcagcatgtcccatcaacccccgtcagaggggtttcatagcggcgccggggtgcgccgagaacctgaaggtgcttgagcttctcttgcggaagaggaagcgagacaggcagccgttgggtgtggtatttgtggatctagcgagggcgttcgattcggtgtcacacgatcacatttcttgggtcctaaaggccaaaggggtggacgaacacatcgtgaatctcatcgaagattcttaccagaaggttaccacgagagtacaagtgttcaatggcgtcacccctcctatcagcatcaaaaccggggttaagcaaggcgacccgatgtcccccctcttgttcaacattgcgatggaccccctgatagcgaagctcgagacagacggacagggagtaaaagtcgggagtgcctccctgaccaccctggccttcgcggatgatctcgtcctgcttagcgactcttgggagggcatgctgaagaacatcagcatcctagaggacttctgcaacctcacgggcctacgagtgcaacccaaaaaatgtcaggggttcttcttgaatccgacatgcgactcctttacggtgaacaactgcgaggcctggaagatagccggccgtgagatcacgatgctcggaccaggcgagtcgacacgatatctgggcttgaatgtcggtccttgggttgggatcgacaaaccagatttgggtacgcaactaagctcctggctcgagaggatagggactgctccactcaaaccgatgcagaagctctctttgctggtgcagtatgccatacccaggctgaactatcaggccgattacgcgggcatcggcagggtggccttggaggctctggattctatgaaccggagaaaggtaaaggagtggttccatcttcccgcctgtacctcggacggtctcctccactcccgtcaccgtgacgggggtcttgggttaccgcgtctggcgaaagccattccggaagcgcaagtgaggaggctgatccgcgtagccacttcatctgatgaagtcacgcggaaagtatcctacgcgtgtgggataagtgacgaagtggagcggctctggttggcgaggggtggggacatgtccagtgtaccgaggttcgaggatcctgaggccccgaggtctccgggggtgcagggcccctgcgaggctgcccaggagattccgagcgtagtccggaagcttgcgatcccccggccctccaactggagatccaagaaacactccaaatgggcccaactcagctgtcagggagaggggatggagttattctgcaatgatccagtcagcaatggctggaacaacagtcggggacaactggcggaacacctccagatcgtggccttaaaactgcgttcaaacatttatcccaccagggagtttcttgggagaagccaggcaagtaccaatgtaggttgccggcattgtacacaccctcatgaaacactagggcatatcttgggcatatgccctgccgtgcaggaggcacggatcatccggcataacaagctgtgcaagatcctagcagctgagggcaaaaagtgtgagtggacagtgtattatgaactgcaactgcttaacgctgcaggggaactgtgtaaacctgacctcatttttgtccgagacggtaccgmtctggttgtgaatgtcactgtggggtacgaagggggccccgcawccctcctatccaccgctgcagaaaaggccacaaaatacctggatmtgaacgcacagatccaggagctcacaggggctgagcaggtcacctactttggcttccctatwggagccaggggaaagtggcatgctgacaactgkcgagtactgtctgaactgggattgtccaactcccggaaggagcgggtcgcacggctcctgtmgtggcgagcactgctcgggtcagtggacatggtgaacatctttgcatctaagcacaggcaggaaaacctatcggatgamgcactgagccccagctgagaagttgcgagttcttatgcaagttgaataccactctkgkgaccccaaaaaawwaaaccccaaaacagttgtgtttaagtgtgttcttgttcgtccctttggcttcacctcsaagttgcgatccccccatctcccctgcgctgcctttcagaacggccggtggtgtcgaggctggcgcgacctcggtcacctccaaggccaagtgccctggccccgagtaggactgagtggcccagctcgctgggcacccgtcaccatctggggcaaatggaagggatctgtcctgaccactaccaggctaagtgtggtgcggcctagcctgccgtaaggtcaagcgccctgctgccactcaggtatcagtcctcgttcacttgtccctcctagtaccctctgcctctgctcttttgctatccactatggccagtgatgttgaggttggtgcatccttggtcacctccagggccaagcgccttggccacaggtaggacctggcacctgcccagggggccagacactgcctgtggcaagggaaagggagccgtccctgaccgttaccaggcttgagatggtgctggctagcccaccatatgtcaagcactccacagctgcttgagtttgttggcttcaccttcatcccacctagtgtcttctgcctctgcactattttcatcccaactcgtacctccccatctctgcgctcctgctatccctgcaaggaccaagtaggcaggggggttcatccccctacctgcaggagactcagcatatccatgacttcttgcctccaccgtcttgtggcgctagaggggtacctcagagaccggcacaacatgaccttgacggttagacagtagggtcaaacaaccctgctgcaggcccaaagggccaacagctgtgccacgagaggggaaccttgaagactggggcagtctgaccatgctggttagtcagttgggtgaaataatcccagctgcaggcccaaaagggctgacagtcaggtgagggggtatctccatctgctccccactgccaactacggaggcatgaagtccgtagtgacttctgacccccacgtcttgtgccatgagaagggaaccttgaagattgggacaaaccgcacttgaaagttactcagccgggtgaaaataagtcccagttgcgggcccctcggggctgacagtcaggtgaggagggctgcaaagcccatctcctgactccagaggcctggcgtcctaaccgacttcttgccaccaatgtcttgcgccaggagagggcaaccttgaagatcggggcaagccgcacttgatagttagccagtcgagtgaaacaatctcagctgcgggtccgaaaggactgacttccaggcgaggggggggcctgcggaaaaccccctccatggtacggaggtctggcatcctaaccgacaccttgccaccaatgtcttgtgccaggagaggggaaccttgaagactggggcaagccgcagttgatggttagtcagtcgggtgaaataatcccggctgcaccctgctgtgactgctaagcccggtccccaaggggcatgaggcatgtgcgctgagacgggaggggtgacatctggcgatcagcacagcacagactgaagggaggcacttgccgagaatgcttctgaggccccagacttggggtggtgcagctttgtctcgtgtatagtacagcaccctactgctccctttgggcagcagaatttgtcctgacctcttacccacccgagtctgcgcttttgttccacctcgctgtctccctgctgtgctgtttttctctcaagtgggttaaatctcaacatgattatctcccacgtttccgctcaagggcaatgcccaacatgacggagatcgttggtgcatggtagtcacgagaccatccggaccctccagtggtcgctatagtcattttgtgttgcatggggcatgctgagtcacttaaccgaaagactgtaaataactcaaaagaggtaccctccggggttcggtaaa

SEQ ID NO: 1090 - DNA, 4425 bp, Ixodes scapularis
  source 1..4425: mol_type = unassigned DNA
gttccaaaggaaggcactcctttggttcgtgatgagatgttcatggtgcttgcctagctggagaaatccgactcacacctgcacgtggtccctgccgcctgccagtatgccgaggaaacgggtgcaacttaatccgtggatactggtagcaacgtgagcaacggtacggtccttcgcggaccaccctgggcgttcgggttgccagcccgttcgcccgaaatatcttggccctgaaactaaaagaaaaatgcaatgcaccagccgactggctgatgcaccaagatttgcccgagtgggcgtcgagggtgaaggtgtcggtgcgtctggtaacggcactgatgcgcagttatggtatggctgcacgggctgtgacgaagccttctcgtccctgcgaggactgagaattcatgcggcccaaaagaaacatggaaaccaagatggccttctccgcctgccggcgggacggccccgaaaacgacgagtggggaagagcaccacagcgggtgcttcggaccgggtgaccacggatccagtgcctgctccagttcctgaatctcctgggctgctgcctgggctacctggaccatcgctgcctgggtgctcggacctgccgcctggggtgctgcctggagggtggtctgcatcacctgggcctctctcctggcctccttccctggatgccgggcctctgcctggaccttcaagagtatcacctggaccttcaagaccttcgcccgggaagccgaccgggcctccttccctggatgccgggcctctgcctggaccttcaagagtatcacctggaccttcaagaccttcgcccgggaagccgcccgggacgcctgagccgctgcctggatctcctggcggtcggcgcggggtgtccccgggacagcccgggtcacggaccgacccctcaagctctgctggcgccggacacttcgtatgcccgcagtgcagcagagccttctcaagcaagattggcatgtctcaacaccaaaaacatgcccacctcgaagaatacaacgcgggcattaacatcacccgtaccaaagcccggtgggaccccgaggagacctatcttctggcccgcctggaggccaccctcaacccagaccacaagaacatcaaccagacgctgcacgccgcgctgccccgcggttcctgtcgaaccctggagagcatcaaggcccaccgaaagcaggcggcttacagggacctggtgacgagcctgcggtcagccagggagagcagcgaggcgcagcacgttccggaccggcccctggagaccccggagccccagacaccagcgaaccctcaaagagactcgaagcaggcagtcatcgaagcgctgcaatccctcatcggccgagcaccaccaggctccttccagggagcgcgtctctgggacatcgcgaggcaagccacaagggggacgaacatcctcccactcctgaacagctacctgagggatgttttcaccctccccacaaagccaacaagaaagaaacctgcagtgcggcccgcccggagccgcagaaaacaaaagaaacaagagtatgccagaacacaagatctattcaggaaaaagcagtccgactgtgccagggcggtcctggacggccccacgtcgtcatcggtccctggaacgggcgccttcctgcaaacctggcgagagatcatgacggggcccagccctgcactcgaggcaccgcctctacctacccggggggaagtcgacctgttcttcccggcgacggcgcaagagatccagagcgctgagatagccgtcaactcggctgctggacccgacgggttctcagcccgtctcctcaagtccgtcccggccctcctcctaagggtcatggttaaccttctgctcctcgtccgacgtgtcccggcggccctccgggacgcgagaacgaccttcatcccgaaggtccccgatgcagtggacccctcccaatttcgcccaataacggtggcctccgttctccagcgcctactacatcgcatcctggccaagagggcgctggaggccattcccctcaactttcgacaaagagcctttcagccggtggatggctgtgccgagaatatatggctgctgtccaccgcgctcaacgaggcaagaaccagacggcgcccgctacacatggcgagcgtcgacctaaccaaggcattcgaccgggtcaccacggatgccatcctgaggggcgcaaggcgcgccgggctgtccggggagttcatcggatacctgaaggagctctacacaacatccaggaccctcctgcagttccagggagagagcctgcttgtcgaacccacgaccggcgtgcgacagggcgacccactgtcgcccatcctcttcaacctggtcctggacgagtacctctcctccctggacccggacatctccttcgtctcgggcgacttgcgcctcgatgcgatggcattcgctgacgacttgatcgtctttgcctcaaccccagccggcctgcaggatcggctcgatgccctcgtcgagttcttcgacccaagggggctcagggtgaacgtgaagaagagcttcacgctatcgctgcagccgggacgagacaagaaggtcaaggtggtgtgtgaccagatcttcaccatcggaggaaccccactcccagcctccaaggtcgcaaccccttggcgctacctggggatgaccttcaccccccagggctcaatcaacaagggcaccagcgagcagttggacctactgctcacgagaaccagtaaggcccccctcaagccacaacagaggctggtggtcttaagaaactacctgctcccgaggctataccatcgcctcgtgcttggaccttggtcggccgccctcctactgaagatggacaccaccattcgaggagccattagacgctggatggatctcccgcacgacacaccgctgggtttcttccacgccccagtaacggagggaggcctaggaatcaactccctgcgagcatcaattccagccatggtgctccaacggctggatggacttcacttcagcacgcatcccggagctgaggtcgccatccagctgccgttcctgacaggactccatcgaagagcggaagcggcggcccaataccagggacagagactactgtccaaagcggacgtccaccggatgtggagcgcaagactccacgggagctgcgacggaagaccccttcgggagtccaagagagtgccggctgcccatcgttgggccgcggaaggcaccagactactctcgggaagggacttcatctcgatcacgaaactcaagataaacgcgctacctacactcgagcgcaccagccggggccagcacaaggacatccagtgcagagctggctgccaggctgttgaatccctgggccacgtcctacaagcttgccatcgaggacaccgtggccgaatccggcggcatgataacattgcccgctacgtctgcggccgactgacccagattggctgggcggtgaagtgggagccccactactctgtcgctggaaggaccctcaaacctgacatcgttgcccatcgtggagccgagactgtcgtgctcgacgcccaggtcgtcggcaccagcatgcgactgggcttccaccacgctcaaaagaaagaaaagtactctctcccagacctcctccaccaagtctgcgagggacggagagacgcagcccgggtgtcaacaatcaccctcaattttcgaggtgtttgggcacctgagagcgcccaggacctgaagtccctgggcctgacggacaacgacctaaagcttctcaccgtccgctgcctccagggcggcgcgcagtgtttccggctgcaccgccgaatgaccaccgtggtgaaggccacgggcgatgaagccaacgccctccccgcccattcgggcttgccgccaacacagcttggtggccgaaccctgggtccctctgcccacaatcagagtgcaagaactacttagtgtgacggagtcctcaagcccccacaagtgcctgccaggtggcaggaaagggcaactactggtgagcgacccaagcaaggcggagccaagaccaagctggagccaagagcaactccaggaggcaggggtggatatcaagagcaaccccaagggacacagaccacgggcaactactggtgagcgcccaagacaggggtggatattaagaacagccccacaaagtgttacctatattaacaataaagttgaagcctcaaccacgcattgcgggttagatggcgtggcttggcccgccgccatgatgagctggaaccctccacctggtgggccgcacgagaccaccggctctttctactaaggccggtctccgtgactgcggttgggataaactccaagcactgagcggtaaaaaaaaaaaaaaaaaaaaaaaaaaa

SEQ ID NO: 1091 - DNA, 4740 bp, Mnemiopsis leidyi
  source 1..4740: mol_type = unassigned DNA
tgggggccccttggacttgctccctggggcaggacaccagtgaaaggagatcctcaagacaggacagagagacaggcacaccaacccttcgaacctgaggagacacccagatctggttaccccattcctgtaaccatggttgctctccgtgcgctgttaaggaaacccagcctagtaccctcggggaaaggttgcgtagtacttagcagtgtgcggatcaaacctctaccggtctctctagcgatgaaagtttctccgactggaacttgagggactggctagcccagctagcctgtagagcaatgcgtatacgatgccttggcgacaatggcgaccgctgcttagcagacggaggttagtgaaagggcgacttgctgttcatagtcacgtgagtcgtctagaaactgcaccgatgctgccctctgttccaggagaaggacagtggaggactaaatcgtagcgcgagcggtgttatgtcgaacactagccactcgaaacttaacctcaaaatggataataaactcaagactagtctcgagactccctccggagtccgagcagattcgataataacgcgggtgaggaccagcagtaaccgtggtgaacacagcaatggtgtcacgtatccccggtgcgaacagggggttgcgcctctggatacgcatggggggatatgtgacgctcctccacaggtgacggttcccgccactgagacggataaacagaaaaaatgtgaatactgcgagttcacatacctgaaaccgagacagataggaacccacatgagaaaacggcatccccaggaatggaacgacatcaaacggaccaaattcctgagcgaaaagagacaaaaacgttggcttgacgaagacttcgagcttctctgcataggccaagaggaataccttgtgctatcctcgattggcaaacagggcaaagggatcaaccagtatattcaaaccaagtacttcccaacccttagtacagatgctattaaatctcaaaggaaatccagacggttttcagagtacagcgaaaagagatcacgtgaactccaaccttgcaataccagcagcgaccccgaagaacttccgaatgaagcggtcaccgaaaacagtccgctctcttttgatccacttgaccgagatgttgtaaagaaaataagctccaaagatcacggcgatcagatcctcttagtacaggagcacctcatcaacggacggtatcaagaagcgaacacgttggccaaagctatattcgagaagctctccggtaaattcccgaacctgaagaccggcgaccatcggcctggtaaacaacaaacagcaaggaaagtcggtaagaaaagagttagaggaagcggtaagaagctatccccctctaaacagaatagacgcgagctatacgcgatagtacaaaagcagtggcgcactaagaaaagatctaaggtgatcaaccagatactgacaggtaatctaaacaaagaacaatcttatacacatacacccgatcagctagcgcaattctggagtacgctgtttggcagagtcagtccgagagacgatcgaccgattaaccaccggcggtcagttatcccggagctagacaaacccctctctgttgaggaggtcgaagctgcgctcaaaggggccaaagatgctgcaacaggcattgacggagtcccaatctcccacctgaagcacctaggcagtgcagctctaacaatcttgtacaacggattgtatgtgaccgggtcgattcctgacccctggaaaagagcaagaaccatactgatcccaaagtcaaatccaccagcttcacctggggattatagacctatctcgatcagctcgtatttctatagaatctacacgagcgcgatcagcaaaagacttgcttctgccgtcagccttgacgaccgtcagaaaggattcatcaaagaagatggaatacgagacaacttatcattgattgatactctcatcaatgagacgaaagcaggctcgaaatccctattcatgaccttcatggacgtcaagaaagctttcgactccgtgtcgcattacgcaattgccagatctctagaatgggctggcgtccccgatggaatgagaagtgtcatagccgatctataccaggactgcaccactgatatctgcggcagatccgtcaaagtgaccagaggcgtgaagcagggagaccccctaagctccactctgttcaacctggtaatagaaatggtgatgtcaaacgtccccgaacgtttgggaattcaattccagggacacagactgttctatctggcttttgcagacgacctagtcctcctgacgagaggacccacagctaaccagaagctagtatccttagtccatgaacaactagcaagagttggacttgagctacatccgggaaagtgcaagtcaatcgctatcatggctgaccccaagaggaaaaccactttcgtagatcagggatccagtgttctcattggaggcgaacccgtctcttcgctcggtccgcaagaatggtacaaataccttgggattaaactgggatcaggaggcatgccccagggtatttaccgagaccaactagcagaccttctagcgaagacagacagtgcccccctgaaaccccaacaaagattgtatatactcagatcgcatatactaccgaagttcaaccatagactaatgttcgagagagtaacgtgccaaacactagagggtcttgacaaactgatcaggacccacgtcagaaagtggttgaaattacccaaagacacgcctggtccagccttctacgctgataaaggttcaggcggactcggactgataactctcagataccgagttcccctcctaaaacttaggagacacaaaaagatggcggactcacctgatcccgttatcaggttgataccaaacgcggaaccgaccatctccttgttagctagatggaccaagatgtgctccctctatggcaaacagtaccagcacaagtccgaactctctaagataattagagataaatactggacaatgtgcgacgggaaaggcttgaggacagaggtgccaccagatacggctaagaaaacactaagcctgctattcgaggaccggactccactcaaaccaggacaactaattggagctatcggggtccgcctaaatacccttggtacccccgctcgtaacaatcgagctaaaggctacagtcctgaggctaatatttgtgacaaatgtccaggcaacaggcaggccactcttggccacatctcgcaaacttgtccggcgactcacgggaggagagtcaaacgacacgacaagattgtgaacagaatcgcaaaagctctaaaagaacgaggctccgtcaagaacatacttaccgaaccccacctcaggcacgataaactgcccctacggaaacccgacctaatagtacatacggaaaagtcggtcgaaatcattgatgtccaggtcgttgcagaccagggcatctcgaggcacgaagatgaagaccaacaaaagaagatcgtcaaatatgacgtggatggatacaagagagcggcctacaaaatgctagggattgactacgggagcatcccctgcaatgtaagtgcgttcactatcacctggcgaggaaaccttgccccccattcactcaaactggcgagtcgtctccagttttcacccgtgctcaaatatatcgtggctgactccctagttgacacatggggtgcgttcctgatatggggaaagacgtcttagtgacgagaaaagtcgctttatccttacataacagtgtgatagtcatccttatcacaactgtcctggcgaacaaaatggcagagggatagtactcggtccaaccagaaggaagcccacacgatgccaaacttgctgtaacccacgtgagcggaaaacatcctccgagtatagtatgatggaaggatacaggatgtggaccgctctaggcggcggacggtgtagacggcgaccttaccatagctgcgactgctgtgcgatccggaacgggcctttctcacttacctcaagcaccgtgtcggatcgcggggtgggcgcgggattcctgctgggaagttgtctgcacccaagtcgtcagctaactgtcggtacttatacgcacccagagccatgctcttaccaggccacttgacggcgctacaccggtctgtaggagggtatctcagcgacttggacaaaatggatcttgactgcctgagggcgcttatcgagtgacccagagtaagctggtaggaagaatcttgcagttgagagggctagtagggccagcctctgctcgtcaactgtcctaggcgttaacgtgtgcctccctatgaggtaaccgtgaagtattacttgtttccctgtagagaccatataactagctgagaaacgccctgcgggttaatatacagttaccgccgtcctgcatccccgagttgtgaccagcgtacagccatgtaccacggcacttccagcattctctggtctaagaatgtatcagctggcccgccgaaagatagagcgaccccgcctctatcactagagtaagcaggcacgcgaaatatatgcaggacgccttggctcagtagctctggtactgagtatagcatggctgaacgcccctttaagttcggtggcccagagactctccgagacttcccagtcctggagagggtacacctttaccagaactttctgtggtcggttg

SEQ ID NO: 1092 - DNA, 4532 bp, Petromyzon marinus
  source 1..4532: mol_type = unassigned DNA
ctattaatgggatgaagaagggggacacgagtttgtgtgtgcatccagtttccatggtgcatgcaggagtggtggtttaaatggcgagactctacagggcttccatggctacacgggatgcaaggcatcagacattttggcacaggcaatccttttggtctctaccgcaatcatgtcttagacctcagtagcgaccactacaaccacagtggtgactgctgttgagtgaaggacgactgagcgctggataacaactttcttgcgtggcccaacatcgaagcaaccacttcggagctggcacaaggcaagagggcagcccaaggtgtgaatcatctcaacttcactgcaggaagaaatgctgtgcaaggatgagtgtgaacgacaccaacgggattgttgctgaccaggaggtgccaaccaaatttgaatggattgactttgggcctggtttctcctgcgtgtattgcacggaaaaacaagtggctacacgtgtggccgtcgtgtcctggggtttcgcaacacaactccacaagatcgacaactatgaggatgacaatgtacttaaagaacaaagagactgacgccaaaggggatttaaaccgccaaatcgtacattgggtctcactacaatttttttacgtgtatttattttcctaagtgtctgtacttgccattcttcgctgctttttctgcattaattgcatatcgtatgcaaataagcgaattaaccaccaccgtgcaactatatgcagatgttacagctgagccctctatcataccggtgtactaatctggtatggtgttggcatgctatgcttgcgtaacgacctttgctgattggttcagtcggctgatggtgggttcaggcgaaacatttgtatattggtttaatcaaaccgaaacactaaaattttgaacacagttttccattacaccagttgtattgctagaagtgcaaatcgaaggagtcaattttgaccgacgattagctgccgatgtgcggtgaaaaagctgatcacaatagcatacacttgggccgacaaccccgtgtgctataaacgtaagtcgcgaattataaagaaaacaaaccggacggactactcggtgacgaactaacatcgctcatgaatgagcgattaacagacgagctgactacggaatttatcctttcggacatgtttttatgggactacccatgcacagatcagaacaaatgttatccatgcaatcttgttttcctagaccacagaacttggtcatcacatatggcacgggtacatccacatgcaaacaaaacgtataaatgtcgaatttgtaatcgcacagcagatagcatacacaagatagcgtcacactacggaagaacttgcaaaagtttaataggtaaaactaatgctataaccaccacaattgatgaaacactatttagttgtttacattgcagcagaggttttactacgaaaacaggtttaggggtacatactagacgaactcatccgacagaacatgaggctatactacagcaaaacacaccaggaaggaaagttagatggggagaagaagaggtagaaattatggcccataaagaagcccaacagaaggatgaggacataaacatgaatcaactaatacagaactcagttatgccacacagaacgctagaagcgattaaagggaagcggagaaatatcaagtataaggaattggtaaggactttgaaagaaactacctataaggtagaaaatcaatgccttgttaacttagttttaccgacaacatcggaaataacaactacaccttcggaaggagatcagccagcaataagggccgaaaaagaacaatcaccgacagcagctgaggatcttcaggtcataattaacgatctaaagagccagaattttagccacaatcaggcgttactgctactcaattctcatgtagaaaagtttttaaatcgaagtaaaccaattaaaaggaaagatcacgtaaaccaacaggagatagatgagaataggcatcgaagacaatcaaagcaaactaaatacaggagatatcaatatttataccatacgaacaagaaagctctattagacgagattacttcagatagatcggggccaagtatatacccaactgaggaaagcatacggggaacattcgttactttattcgagtcaaactctcctccagataatataccctctaaattaaaaaacgaccaatcctgcatcgatatcgtaaaagcaatcaccttagatgagttgattaagaccctagcaattatgaaggataagtcacctggacaggacaacattactcttagcgatcttaggactttaccaataaaatatttactagatatcttaaatatcatcctttacatacaggatataccacaaatatggaaacagcacagaacaagacttatcccgaaaactaaagaggaattagaaaaaccctcaaattggagacccataaccatctcatcaattgtaattaggctattacataaaattttaagttatcgtctaggacagcaattaaagcttaattacaggcagaaagcattcctcccggtagacggatgtttcgaaaatagtgcattactacacttcatcatacacaacgccaggcaaaagcacgaaaacacgcaaatagtgtcaatagacctcagtaaggcattcgattctgtcagccacgaatcgattattagagccttaaaccgatttaacttatcaaaggaatccataacgtacttgaccaacatctataagtgtaatctaactgatattgtatttggatcgacaataatgcgtaacataaatctaaaaagaggcgtaaagcaaggagatccactttcaccgttactatttaacatgattatggatgaattattagataacttgccgacatatataggagttaatgtaggaaatcagaaagtaaattctatgatgtttgcagacgaccttatcctatttgcagaaacggaatgtggcatgaataaactcttagatataactactaaattcctcgatgacagacacttgaaaataaatataaacaaatgcaattcgttaagatttatcaagtacggcaaacagaagacatttagtgttgcaacgacatcatcgtactttataaataacgaacccattaatccggtatcatatgtaaagggattcaaatatctaggcattgaatttgacccaaggggaaaacgatctataagctgtaacctgctcgcagcaatgttaaacaaactgaccagagcaccgttaaagccagaaaagaaagtatatttaatcaataacaatttaatacctcgtattattcatcaattggtcctcggaaaagttaccaagggtttattgatgtcacttgattctgaaattaggaaaacagtaaagcttctgctcaggttgccacacgatacgcccgacagtttcttttatacatcagtatccaacggaggaatgggtataagaaatttatgcgactcagttgcactatctataataaacagacacaacaaattgataacttcagatgatctagtaataagagcattatcacaacaatcatacactattgcaacgttaaaacaggcccatatcattgcaggctccaaatttccttcgaaatctttaaatcagaacaaatggtcaaataaactatatcaaacaacagatggtcgggggttggtatactgccaatctcaaacagaaaacaattcatggataacagggaatcatagaacaataaaatcgtataattacatagacatggttaaactaaggattaatgcactaccgactaaatcgagatgcaatcgagggacgttagagaccaagcaatgtagatttaaatgtcgaagtattaacaaccaaatttcagaggaaacattggcacatatcttgcaaaagtgtgatcgcagtcattattcaagaatcgcaaggcatgattctttggtgcaatttctggcaacggccgcacaaaaactaaactgggaagtgatcaaagaacccactttaccgagcgatacaaataaggcaaaaccggacttaattttagtaagagactctcatgtcttgatagtagatgtggcagttccgtgggagtctcgatcattggcacatgcatacgattttaaggtgaaaaaatacgctactgacaaaaaaatgcaagcatatttaaaaactatatatccggaaaaagaaattagaacggaggctttaatcatatctgcacgtgggggctggtgcgctttaaataatatggtaacaaaaaaggtgggattgtcaagtgcatgggtaaaattagcattgatcaaggtcatggagggttccgtaaagatatggcgctcttggagcaaaggataatttaaggtaaaatcgtgggattgttttgatggcaatctgcctagtcgcggccttccattttgggtaggcagcagacccatctatataacaaactactttgcctttcataggggtacccgaccctaccaactttcggggaagtaaaagaaa

SEQ ID NO: 1093 - DNA, 5417 bp, Schmidtea mediterranea
  source 1..5417: mol_type = unassigned DNA
  misc_difference 4446: note = a, c, t, g, unknown or other
  misc_difference 4632: note = a, c, t, g, unknown or other
cagtgctattcgaatgtcaatgtgaagaaattcaactaagctctggttaacggcgggagtaactatgactctcttaaggaattaagaatttacctgccktaktaaaartgaaatcmgttgttcatwgcaagtggtattgtacaccttcccgcggtgctagtcgtttaaaactaagttacaaaccacgaggggcgtcctgacggactgsaaaagcattgagrgtcmtgaagagaggctcttattgtacgaatctcttcaacgatcgaagtctggaccgatatgagaactaatacattagttgacaggtgaaaaatactgttgattacttagttctcagtcatgtggtatattgccagtcaattactacatwaatattagtgtggctctcaaaggaacacgattgrtcggcagtccaatgcgcgactggcgggcttgttgtttgcatttgttaccggctacttgaaaaggttatatatagcagacgcttaaagcgcgactgtaatttacatytcattgcccagtatttgtcttttgtcagatttagcaaaatttcatattttgttaattaccttaactggttaaacgatcccataattgcttgcaattattataaagtaattcaggtaaaaattacatatctggctgatcctgccagtagtcattttacttccgccgcgctataaaacagtttaaaaactgaataggaatcaaaaagaacatggcaagcgactatatgtaactgggcattcaacattccctattacatatggtggtgcctggggtctgttttatataatgggtacccgggaagtggatctgtatcaccagtcatggtgccatatctttkgataaagatacagtttaaaactgcgatgatactaatagagatcctcttagaccttcgtaaagaagtggggattgatgacattagcattggaagaattaaatctccaaggaaatggagtaacttcaatgaagtcccacaaccccgttgaagggctgggttcgagtatcgagagaaaactctaaattctcttcggttmtgtccaacggaggggacattactgtaaaatatcctctaaaaacaactatgaaaaaagtcttaaataatgaaaccgaaaaattaccgggaagtaatctaactttcatgtgcgggttctgtgatcgggaattcgacacggcwaggggcagaggagtgcacgagagtagaggtcatttagttgagcgggatgcggcggttcagagcagagtgaaagccgtggtgagtaaaaagtattattatagtaacgaagaggatgtggcattagcgaaaatgcagttasagcatgcagatctggccaaaagcgaacwattagaagccatgtatcttgcattgggaaagggaagaactcgtgaagccatagagcaacacataaggaaatcgttacgttataagggggtccttgaagaacagcgaaagctccttgagacagcaaggggaaatgttcggcaaaataacgtgggtgtgccagctagcaatgccactaaaaatctgcaaagattcttagaatcgttacccttgggaacgaataggcgcgaggaacgattggataggattatccgatctaactcgatcgaaagccaaagacttgaattgatccactattgtaacgatatgtgtcaagactttgtgcaactagactgtcaaargaaccccatcaatgctataaggcgcagaaatccgaaaagactatcgaaaaagcagttgaagagagctaaatttagcgctcttcaacggctttggataagggatcggaaagctgctgcacagttagtgttgaaggataagcttgatagtttgctcagcaataaagaggattccaaggatttgggatcgtattggcaacaggtcttcgaacgtgagtccgaattagaccgcagacccataccacaagtggtggaaaacgaagagttaaattccccggtattagagaaggaagtagagtgggctgtcaaaaacattaagaagtccactgccgcaggaccagacgggttaacggcacttgccttgaagaaaataccgtattccgagctagtcaaactatttaatataatactgttggtgggattcctacctgatgtattaaaaaatagtagaactatcctaatacccgaagtggataatccccaagggggyggtgattatagaccgatttcgatcaattcagtgctcactagaacactaaataagatcctagcgaaacgagtctcggaaggtgattttggtatcaatggtcaaaaaggattcaaaagtgtagatggttgtctagagaatctagcaacagttgaatcaattttggccgatgctagaatgaagaaaaataagcttgcggtagtattcttggatatgagtaaagcttttgattctgtaaaccacgagagtattgttagagctggagaaatcaaaggttatcccaaactattaatgacgtatgtgaaggagtgttataacgacgctactacgaacgtcgcaggtgtaacagccaagtttaaccggggagttaaacaaggtgatcctctttcgccggcgttatttaataacgtaatagaccttgcaattgagcgagtttccggtactggaattggatataatatgggcggtaagaagtattctgtggtcgcgtatgctgacgatcttgttctattcggtgagtcgagagaggggttgcaaatagccctgacggcgctactggaggaattaaagctaaacggtctgacacccaatccagcgaaaagtgcttcgttgacatttgagagatcagggccacattggttcgcaagtaccgataccgttacagcactaggagatcaaataccggccatgggtaacatcgaaacctataaatacttaggaatcaagtttaattcgtgcggagtggttaaagggagtctacccgggatatacaccaagaaattggagttaatctctaaggctcctttgaagccgcaacagcggttagctatgctaaccgatttcttgattcctggagtattacaccaagccgtgtttggacagacaaatgcaggggacctgcgcagtctcgataaacggacgagaagagcggtgagatcttggtgtcaccttccctctgatacgtcaacggcattcatccatgctaaagctaaggatggaggaatgggaattccatctataagagccgaagtccaatttggaaaattggatagatttggaaagttacccaatgtcaaagatgaacgatckaaagttttggccgataatgctcacattaaaaagaagatgttagagaaattgggagtggggatcccaatcaaaggagtgcgttgtaagaacaaactcgagttctacaacaagatgcgtgaagagttgattaagtcgaatgatggcattggcttaaaagaggcatctttggttccctctgcgaacacttggttaaaactgagtgacctacatatgagcggtcgcacatttgtaggatgtcttaaaacacggggaaaccttatggctaccgtaacaagaactagcagaggaggtcagaacccgggtatagagttgaactgtaaaaagggatgccaatatcagggaagtctgaaccatatagtccaaaagtgcccagtagtgaaagggttgaggataaaacgacatgatgaagtcgttaagtatgtggaagagatcacgaaaaaggctggatggtctgcaacaatggaaccaataattccgttcgaggggtcacaccgaaaaccggatttagttctggtccggggcgatctcgggaaagttgtggatattcaaatagtttctgatcactgcggtctggatgaaaaaaatagttgtaagatcggtaagtatgataatgacatcatacgaaattatgtaagggggctaggaccatcgagagtggaggtagcggcgataacccttaattggcgaggcgtgtggagtagagactcattcaatctcattaagagattaggaatgacagaaatggatgcgaaaatcatttctatgagagtgctggcgagcactgcgaagatgtttaagacgtgtaaaaaagtgttagagcccgtttgcagaaccaagaccgctgattgtgatggttacggaccggaggaaacctccgcccgaccatgtcatgagcttaacttgaargagagttcggggacgtaaggccacgcgcgtcgtccttgtttgatcactagtggatcaaccttcgactccccggaactgtgggagtggcggaagaaaggccagaggatgtcctgaaaccatatatttatttatagaagttttacttcatcctatttacgtatttcagtatgaaaatgagtaaagttctcgactcgatgagttgggggcaaccattgggggtcctgaagagaggctctcactgtaaaaaatctcttcgtgtctgtttattcctaggcacntgctgcattatgaagcggwgaaagtaaagttagagctgagagataggtacttgctgcattatgaagcggagaaaggcctcgaataaatagggtgttagagttattgatggagagtatactagtaagcttaagctgcgcctcgcgcggtgcccaaaaatatacttaatgagagcaataactcaaggngagtttaattcatatgcgcatgcggcaccaaggtgctgaatggcatcgattaaacctctcctgttgtagaagcaggtcataaatggaggrgggcaaccactgaaacttatgagccagaagaagcttaactacawaagttttaggcaattactgaacggagttaactgttagttaacactaccatgtagttgtttataaagcaaatatcaggtttcagtctatatactaaaagtattttttgataccgtggtatataggcaactagttaggaaatagtaagggatgacgcattgtctctctttatggtactgaggaaacttatcgactcgcgagggatgaaacccgtaaaccgatcgatytagcctataagtaccagcgacagttaaaccatcttacgcgaggggtaaaacctgaggaccgattatggtataacttctcaagattagcacaaaatgcgagtgcaacttgaggaggaggatttgagtgttaattcataatgtactaatctaattaaactgtgacgggaattgcagcttcggctgtaattactttgaggcctatcacggattgtaaggaacatattgacaccgtaagtctaacgtgttcccgatttccaaccaggtcatatgaagggctgcccttgataaggcggatttgacccaattcttcatatgagaggcttattccagccttcccgtagtaccgtgaggttttcccgcctcgaacggaacaatgttgcagggtaattaagtacatcgggctatatmgcgatatttaacgtttta

SEQ ID NO: 1094 - DNA, 5586 bp, Strongylocentrotus purpuratus
  source 1..5586: mol_type = unassigned DNA
tctcgcgacgcgttcttctgcctgatgaagtcacgtcaggtaatagacttagaaggttgatgagcgttcctctcctggaccgggggtgaggatgtgttctactgaatcatcgttccggttgtgaggtccgctgcaaataggccttggggtggtctacctccgggtcgctactccttttgagctagtcgatccaggtgagagtcggggaagcccacttaggtgggccagctaagcagatcacccccccagcacgacagtgcgctgtaatatagcctgttgagagtgcacccatttatactgttataaaagtataaatggttcttagctaacctatccaatgatttttattgttatgtataatactgaccactttagtctagtgtcatgtaaggatccgagacaatagcctatgtctctagtctagcaataacacaagagggataatccacctccctactccagccaccacctttacctttcttatcttccatatagatgccaaccagacgggtcgatgggcagtgagaaacaagaatggggataatttggaatttgacattctttcctaaagcagacctgaagggttaagagtcacaagcggagtccggactgtctttataaacagacaatattttcttattttaccacctatatggggatatttcccaactcgtaatatagggcccactgtcaagtggctggtataagttaccctgtgggtaacaaataaattcaaacaaagaatggaaaactcctttgcgtgggagggtaccagttctgctgaaggcagaacaacagttgaggattcaccctcaagcagtgacgattttgttagcaatgtcggattcaaagtagctaaggcggatcccactgtgtgggaggaagccaatatgtcagaagacaatacaataattgaggacccaccatcgagtagcgacgactttgctaacaatgtcggcttcaaagtaactagggcagatcccactgcgtgggaggaagccagtacatctacagagactgaggatttaccctcgagcagtaattttattgacaatgtcgagacccaaatagatatggcgggccccactgcgtgggaggacgccgatagcaatgaagataacatagatgagggcacacccaataatattaataataatttagcaatagtcagagggagggcggatgcctatgcatgctcgtgttgcgaacggaacttcatttctctcaaggcaatcggtactcacctcaaggaaacccataacaaaaaggttgtctttgaatgtgccaaatgtcaacacaccttcgttaaagcacacggactagcgtgccacgtccccaaatgcaaagaggacgccgacacacctatgcttaatagactgctccacggctgtggagagtgcggtcttgcattcaatacgagaagagggctgtctcaacacgagcgccataggcacccgtcggcgtgtctaagtactaggagaaggtcacggctagatggtatagctaggaaaaaatcattgaggaataggagggatatttggacgaatgatgagatccgtctactcaaacaactcatgatacagtacgagcatgctaaaaagataaacattaagatagcggaacatttcaaccataagaatgcaaaacaagtcatgcataaacgtagatccttaagggaaaaggacatggccttaggtgctccacatgatgcacctccgccattggcagaagaaccgataatagaagtagttgagggtgcgagagaagagttagaacaggctcctgtagatgtaatccttccagatcttgaagcactcacggttaatgatgggagagggggtggcagccccgtgttgaccgagggaggggagagtacaagggatatggaggagaacggggggaccgacacacggtctccctctcccagagaggagagagcggggtcgaccccctgactccggggggagtggtagaagattatgatgactcgtacttagaagactacttccctgggtgggatgaggatgagcacatgcatattattgggaggctcgacctaagtgacgagtcggaacaaggggaggctgctgtcagtccaagactaggctccttcggagacctattagaagaagttaatgcaatggaaggcaaggataacctgtctgaggcactggccgaaaccctgggccttgtgttacacgaaggtcatagagtagaatacattaaagagaaaatgaacataaatgttaaacaaatggcaacagaaatattagcccacggggcaaataagggaaaccccaaacggagaaaggaggcggtcgccgccaagcggaatcccggtacgagattagatcgagcccagagggacaaccaagcgaaggccaaggccaaggagaaaaagagaatcttctccgaaacacagacccaatataagaagaatccccacagactcgtggaaaaacttcttgatgggaagggtgacgagcggtgctctgtcagccttgaagtgatccaaaggacctacatgaacaggttctcaagagaaagcaaagaggttgacataggagcctatgttgaccccgagactgtggaggataaccaagggatagtggaccccatcagcaaggctgaaatagaaagggccatctctaccacgaaaaagggatccgcacctggaccggacggggtcacctatgatgccctaaaggcgtatggaaactgtcaattatacttattaataatgtacaacacatggctggccatggggaaggtcccatcagaggcaaaaacctacaggtcaattctaatcccaaaaggtcaaggggaccccatggacatcaacaattttcgtccattaacactcgccaatgtaatcagcagattatattccaaaatcttgaccaggaggctggacggggcggtaagtgtctgtccgaggcaaagaggcttcactcacaaagctagtattgaagacaatacactcatcctacgggaactcatcatgaagagtaagagaaataaagaatgccttgcagtggtacttcttgacttagccaaggctttcgacaccgtttcccacgatctcatcatcaaggccctgaggaggcatcgggtgcatgaacatctcattagcgtcataatggacctgtacgaagggggaactacatctttcacgacagatgagggcaccacctgccccatcgcgatccggagcgaagttaagcaaggagactctttgtcgccggtgttattcaacttggctctcgacccgctactagctacactcgagcaaagagggaaaggtgttgagatcgggggacacacgttcgtcagcctggcctatgcggatgacacggcactcgtctcgtccagccacctggacatgaccgcaaacctagacataactgtagaatacctcaatgcaacgggactgagtctcaatgtgaggaaatgtcaaggcttcttactcacccccatcaataagtccttcttagtcaatgaagccgagagctgggtagtggaacgggaagctatcccgtgggttgaacctggggacacagctaaatatctgggggtacaagtgggtccgtggtcacgtccgtggccatccattcaaccagtaattaaacgcctcacagcctactgtgagagcatcgacaaagcggcgttaaagccaagacagagaatacacattctaacgacctatattgcccctaggattgcctttgagattgcagaggggggatacagtacactcgtataagggaggtagacatgacaatcagaaactacgtcaggaaatggctattcttgcccgcctgcctttcaaactccttcctttacacaaggagaggagagggtggtcttgggctggtaagcttttacgactacgtaccgactgaacgtatgaggaagctagttagggtgtgtgattctgaagatccggttatagcaggggcagcagcctcgctagggttaagggagagagctgcgaagataagcgctcagacagggttgccagttccagttaaacccaaaggggcacacaatgcatggagaaaagtccagaagaaaaagtggaaagctcaacccacccaggggaagggagttagttgttaccaacacaggttgggcaacaaatggttaggtgcccccagcttcctcactgaaaatgactacatttgggccattaaactgaggacaaacctcgtccctactagggaagctatggggagaggtatcatagggaggaatcaagtggagtgcagacactgccatacaacaatagaaacaatgggacacatttctggatactgccagatggtcctggatattcgtttgattagacacaaccgtatatgcaaagccctgatcaaggctgctacggctacaggactcagagttacggaagaaccacgaatagtgggtacggatgggaaaaactatttgccagatcttattttcagtgcgggagctggggagccatgttatgtagttgatccaacagtggtgtgggatgatgatcccaagaacctgagggaggcctggaggggcaaggtgaggaaatacacaccaatcattccggcggttgaagcgatgcttcacccatcatcagttcaaatatttggatttgtatgtggcgcaaggggaacatggtgcccaatgaatgatgacatagccaagattgtcggtttaaagaactcaggaattagcaggacactacaaatagtcctttgcgacaccataagaatggtcaaggccttcatggccagataaaccttgcctccccgggcccccctcagtgactaagacaactttcaccgtaataatcatatatttgtataccatgtattaatctaggtaacaattgaaagtaacattgaaccgtattcatactttaatgagtacaatagtgaagggaactgtatattacatacctcgagatagaggtttttgtaccttaagggttcgtgagaatccatactgcataaaggggttaacttgtaactcaaccccagggagacaagccgacaaattcggcattactatgtgagggtcataagtgttaaaggacccattgtatataacttgtaaatgtacagagaattcgagttgagttcgaagaataaacaaacaaaaaagaaaacaaagagaattcgttcgtccatagaagcggaaaaagcgcaaaaaggcgtcctaacctcacggtctaacccagaaacatttaaggggggaaggagctcattactccaatccaaaaccacgttccctagcccaaaagcgcgcttcaatgagggagccgatattggaggacagagttcatcaaaagccacctgtaagtaggcccatttctgccaaggacatgcgcaaaaggaagcagattatcaaaccagtcaaacaagcacaaacattggggggatgggataaccccggaaagagagggatctttagatagtggatggaaggggtgggacgttgaatccaaccatgccgtttttatgttcccgataaagaaggataaggtcactccagcctgacacacaaagtggggtaaaagaactccgctcgtacggactccaaatagaa

SEQ ID NO: 1095 - DNA, 7867 bp, Salmo salar
  source 1..7867: mol_type = unassigned DNA
aatctttaaccccggactcttggggttcttacgactctgtatgaggaacagtcgaagagagggcgctaccaatccaagtatatgtcccaagagggctgggacagggtggaagagtgcacctcgcgatctggggcagggaaggaatggagagaagtcgaagaaggcttgtagagaaggggctctcctagatcctaacctgtatgacgcccgtaaaacggtgaccccagtagcgaataaaggaggcaggtgacaatagagggcagggccgacttcccaggtttacattgttgtacttgtcaacataaagaggtgtctcaatagtttgaatcaacaagggagaggaataccgacctgctcccttggggcgggggtactggtcttagcccggttccccgcaagtttcctttgcctgggatgtgcctgactggctccatcccctttccccattaggcacggctagatgacgcaccgatgggcgggtgtgtaggtcgctaccgaaggggactgggggtgtccggtgaaccaggacttcccaaaatggtctcacatttttaagcggcttgagtatcgcccagtatcctcgcgcggcactgggaacccagtcaaccgctctgtgccccggcgcaggcgggggtttaatgtctccccggcttcaccggcgcttcggcgacgacgcagaggagcacccggaggcccccatgaacttaaaccaacctatcttgaaatatggcctctcgttcgggtgaagggcaggtgggaagagagggctgcctcacgataaacacctagtcaatagccagtcgggaaaaatgtggaatgttaggacagggaggtaagggaggcggctttttcgtaaggctccttcaacccctacctgtagtccacctattgcaggtgttgacaacatgcaagatgacctgcctcgttacgggtcgcgtatcattgctacaggtcgtgtgccgcttctaagaggatagtaaggagaggttatagggaggtcctgttagggcttcctcaacccctctctatgcgattccttacaggagtggatcgagaagtcccggacgtaatacaccctggaggtaagggagtggccttctagtagggctgcttcaacccctctgatgggagtgtaccgggaacctcgacttgtaagcacaggttagtatgggagcagaagggggagccgtaatgggcttctctttcacctgcttacataatacctgtggtgcatgtatctaggtcttggcgggagagtactgagagacaaggttgagaccccaagattgggtctccctagcctctatagctgcgactcttagcggggatatggagtaacatgtaccaagggagtgaataataaaggaattgacggggtacaagtgactgttggcccgaatcctagccacttgatgaccagggatatattacagactgagagcgaatctagagacgtgagaataaagtgagaattggttgagcgaatacagaggaagatgagcggaaagagaattgttgagatgagcggttgcgatgagaaaatctgccaaaataagcattgcttgaagcgcagatgggcgtggatttccggcccaaagggggagacatctcctcctcgcaagagaggaacttgcgaaaacgtatccttccaggataaatctcatgcctcggacccagatcctctcaaagccccggaagcgagagaggacgcgggttcggtggcgcctcagtgggttggcgaaataaagacacctagcctaacatcgcgggatggggttagtgaagtcgtgctgccaccacagccagttcatgcagagggagtatccccagccagcgactcaaaggacaaggctacgaagatcaccctgctgatatcactccccgtctgtgatttgagatgcggacgatgtgaaagaccattagagaccgttgggaaggcggtgagacactttgctgtggctcatccgacggtgtcggtggtttttaagtgtcaaaagtgtgagaagagcagcaagaatagccactccatctcctgtcatatccctaaatgtaagggaatgacagagacccggacggatgtggaaggtgatcacggctgtgatcattgccaggagaagtttacaacggctatggggctgactcaacacaagagacacagacacatcgtccagtattgtaaggagaaggagggggagatgacagcaagaaggaagggtgaagtcgaagcagtcaaatggagcgaatgggaagaaagtgaggtggcaaggttgagcgatggactggctgggctaaaaatgatcaacaggcgaatcgcagatagcctggggactggaaaaactgcggaacaggtgaggcagaaaagacgtagaatgagacctgagaaggtacggtgtgacaaacctaaggaggcaaaagataagagcaatcttatcaaaatgctgtccataccgagtgcaacaccaacaccccaaactgggctcaaaggattcctccttggagaactaaatggggttgctaccaaaggtgaagtacagattgggggagttacgttgtccctaaggggggtagagcaagactcagccttgctcaatacgtcggcccttgaactgcaacgattgttgggagggagagcggggagcgcgaatccgttaagcttacagagagaacgtgagaccacattgccaagtgaaagaaggaaaacgaaacaaggagagtaccggagggtacaaaagatgtttcgaagcaatgaaaagaaaattgctaaatacattctagatggcaatggagatggagaagcggcctccccgccactcgagatcgctttggcgttcaaaagtaggtgggaggaagtggaaacatttcatgggcttggccagttctactcgaggggggaagcggatggtgtggtcttccggtcacttatctcaatgagcgaagtatgtgaaaacctgggggcaattaaaaacaacacagcagctgggccagatgggataacaaaaccggcattgcttgaatgggatcccactggtgcgaaactggccgctatcttttccatatggttgacatcgggcaccctgcctgggccttttaagaagtgcagaacaaccttaatacccaagaccgatgacccgattttactcacccaggtggctgggtggaggcctctcactatcgggtcggtggttttgaggctatactctcgcatcctgacacacaggctggagcgggcgtgtcccattaacccgcgccagagaggattcatttcctcacctgggtgttcggaaaacttgatgatcttgggaggtctaatcaagagaagttgggcgaagggcgagaggctggcggtagtgttggttgactttgcgcgtgcgtttgactctgtgagccactcgcacatcttggagatactcagacagagagggcttgatgaacatatcatcggaatcgtaggtgactcgtacaccgatgtaacgaccacaattacagtcagtggggagcagtcccctcccattgacatgagggtaggggttaagcagggagacccgatgtctccgctactgtttaatctagccctggacccaatgatcgacacccttgaacgctacggcttggggtacaggatgggcgagcagcagatcacggccctagcttttgctgacgatctggttctggtgagcgactcgtgggagggcatggcgtgcaatatccgtattctggaagaattttgtcgactgactgggctgaggattcagcctaggaagtgtcatggtttcctcatacagaagattcagagggcgagatcggtaaacctctgtaagccctggatagtgtgtggtgaagaactacatatggtcgggccggaagagtcggtttcctacctgggtatgaaggtgagcccatggcatggcattatggagccagatcctgtcgaacgactctgtaactggatcagttcgattgggcggtcaccgctgaagccttctcagaaggtgaggatgttgaatgtttatgctgccccgaggatgacttatcaggcggatcatggcgggctggggccaattgtcctgaatgtactcgatgggatgatcaggaaagcagtgaaggtgtggctacaccttccgctgtgtacctgtgatgggctactttactctagatgccaggacggtggactgggcatagtaaaattggcttgtcaaatcccttctatccaagctagaagggtctaccgcctgtggcattctaaggaagccataacgcgggtagtcacccgaaggacggtcgaagcggaagagtaccgtgggatgtggctgagagccggtgggagtgaggcaggtttgcctcccctggaagatagggaagaaggtgctgtacagtgtacagacactgccggttcggtgaagccgaaaaacccagtcattcccgattggaggcgagctgagttcctcaagtggcaaaacctgacagcgcaaggggttggagtgcaggtctttggcggtgacaaaaacagcaatcactggatggcgaatccggaaacgttgggatcgaaagagcgccactatattgcaggtctacagttgagggccaatgtatatccaactcgcgaggcactgtccaggggcaggccggacttacctaaagtctgccggcaatgcctagcaggaactgagtcttgcgcgcatattctcgggcagtgtcctgcagtgaaggatagccgcatcaggcggcatcataaactgtgtgacctgctagcaagtgaagccgaaagcgccggatggaccgtcatcagagaaatgtgttgcagaactcgtgccggagctttgcggcgtccagacctggtgtttgtgaaaaccggttttgctttggtggtggatgttactgtgcggtacgagatggcctatgatacgctcatgggtgcggctgccgagaaagttgctcggtacaccccaattactccatatgttgcgatgaccctgaaggcaaggagagtcaaggtgtttggctttccactgggagcccgaggcaaatggccgggaagcaacgaccggctgctgaaggctatgggtgttggtggcggcaggaggaaacagctggccaagttgtttagcaggagggcgctcctgtactccttagatgtccttagggacttctaccgggcggagggagaaacgggggacttggatgatgagagcgtggatgatcatctatagatccgtttgttatgattggagggagcctgccgagtggtatgagcgctccaactattgaacccatatgattcccgaggcctggccagacgcctagatgcctgccacaattgaacgcagccctagcttgctaggagatccataggaactggcctatggggcgtcatgacggttgaagttcctccatagcgtgcttgggaggggacgacaatgacgagtcatgacgtaccgagagaaccccaacccaggttgggggagagagccagcaagagcggagatgcttggtataccaagctagcagagagagggttgaagaggatgactactgggctcagagtcatctcaccctaaaaggcggtggggcatcggttgaacacctacccataccgggatgggaggtggtaggccgaaaaagaacaggaagatggtggagtaagttgagagcggttgctcgggaagttatgttgtgataactccattaaggccggtgggcatggtgcggataatggaaactataaaaacaataaaaagaaagaccaaaaaaatgttctgttatgatgccttacacatgtctgggagaccccataagggtctccccttatacttcactgggaaaccccataagggtatccccctatatttactgggagaccccataagggtctccccctatagatgtagagcgtaaggggtctccaaagtaccggccgatatggccttatggcaaactctggtggtagggacaaggaggtaagggcagtgccaacccctacttgatcgggaccatccagggaatgccatcctcccgcgaaggtgatgtggtgaggtaaggggggagcccgtcttcgagtttccccaacccctacccacaggtgagaggaggagaagaggaatctgtccccaacgggaggagggtgaggtgtaagggggagaccttctagtagggtcttctcagtcgcctgacgtcctgactgtggggtggatcagtaccctacaggtgagaccggtgaggtaagggtgtggccctcttgagggctgcgccaacccctactcgaggtaacctgagggagtggtggaatggcggcatgttagtgctgggacttgattgcgagggtttaatgagagtggcctgctgagagcaacacttgtggtgcttaaagcggggcggcccatgaccaccgtgagataggacactgcacagtgcagccatgaggttcctggaggatgatgcgatgaggtgggggcctcatcagcccctcctggcagggcgtcggccagggaaactaaatgtctctagcatgtcagtgcagtgaggtaaggggagagcactctagtagggctcttccaacccctacctgtaggtcacctggtccaggtgtcgatgatgtgaaaacaagagctactttggtaccggtctgttgcaaaaagggttctgcagaggacgacggctatccctatcgggagggaatagtcggtcccaggtagtggaaaatggggctttccactgagcatgaaaatgtggtagaggttgcgtccaacccaatgatttgcagcagagctcttggacacgaagtctgtatagtcccatgcaggcagccaaccagagaatggtggcaagaccccagctccgtatgggaggggagggccaagatatacggaacggctgctaaagcgttctgccggtgtcagtctaatcacagacagctgtgacgaaacaaagtatgggttccgacatgcttggtcagctcttagccgcaaggcttaaatcgaacgcagcccgccgagagtgaacattaaacggggatggaatgtgtctagcggttacgtactaccagggctcaggttcgcctgagccgaggctctacacgtcatggtgggagttctccccacgctcgtgagggcatgtagtgggatggcatgtggcggaccatcagctggcactaccaggcctcgggcttgcccgagtgcgggacctcacacattgtaggtgtgcttgtcccccctacgttcgaagacttgaggcggagaatactcataggccccacggcaaagggacacaacacggaggcttgtgtccgacgagccgtggactcctatagacagcccgggatatcactgggcacgctcatactgaagaaattcgatgaaccgggcctaccggagcaaatgcactctaatcgcctttgtgggcgactgtggccccctcatgcgagtgaggaatatcataaactgcaatggttcaaaaagtgattcctatggctcgtcggggagggctgactggggcaagcaaatgattgaaaggggaagaacctttttcaactgtttcttgccaagcccggttgatggtggcgctagtaattgcgacgggaaaatgcggtttaagtctccgaagtagtgcgtagcaccggatgtcgaccgggtgtaaaagcccttcgtaaagtccctggggaggtcagtcctggggctactgatgcgcagtatgtaattcgcagaatagggccatcgataccgcctgcgtgactcgactgggtttccacttgaggatatccgaccgtagcgtgcaccctcttgtagttgcgccggaaacggctgtgttccctcacgtatgtgaggaaactcaacaatgtgagtgggtaaacggcgggacgaactatggctctcgt

SEQ ID NO: 1096 - DNA, 4155 bp, Tribolium castaneum
  source 1..4155: mol_type = unassigned DNA
agtcatagagccagaacctcctcgtggtcccgctgggcacagggattaatttttctgtggcaaatttgactggcttcagagagcgtttttcgaagtggwctgtgtgactgcgttccccccttagttgctatwtccgctkmgattaacatctcacctcgacgtwtaagatcattatgtcgaggcgcccggggaagtctaatgagcccccggttcgtagtagggctatgggtttaaccactttatctggcaccaagacatcaaattctggtgcccaggggccctctaccagtgcccccatgcagaacatggctgggggttttgtttgtgactgcggccggagctatgccttgaagacatctctggcccgacacaagaaggagtgcggaaagaacaatgcggagtgtcgatggtgcgggacaaggtttaacaccttggctggcactcgtcagcatgagcgaaaggctcactttgtccagtatcagtctgatctggcaaaggcgctcccccaacctgagtcggagcttatggagaaaatcgccattgtggaggccaggtccaktaacggcatcttctataaggagatgatggcctccacgggtctgacccaccaacaggtcagatcaaggagagagaaacccgaatataagggcttcctggagcgagcacgcaggagcctggcccagaccaatatcagggctggctccatctcaccagcgagtacgawcgcaggctctttggagtctgcgtctccgaaagcggggtgtagtagcagtgcctcgcccggaccgaccaccaggtccagggcacctaccaagggtgtgccccwacgaagctctaattcggcgagaattgtggtggaggcccaagtccatacccgggcgccacccaataccggggaaacggaagtggctcttcgtgagtcacgccgaaccgtgccccggctcgggcmtaatccatctaggccctgtggtatctctcctttgatggcgattgccatagatgaagactctgtgttgggcgggctacgagtgcaggccgggccaagtcccaccgcggtgcactccgtcgaagctttccccggaacgtcctcgatgaccccgatggagaccgatcgggtacataataagtccggtatagaccccattctcgaacataatgggacacggcaggttcgaagggaggagtcttccacacgggaagaccccgtcgagcaatggtctcccaactatcctaaaacgcctgtcactatgcccaacattacaactactgctgatgctwcgtkcacctcgtacaaccgaacacctcagacactccctggaaaccggaggcgacgcagtcgcagtctaccaccagtgcaacggaaatccgcttccgacgawctcgagtccgttgattcgctggggccctgggcggtcttcttgcaagatcaagtagacgccgggtcactaagcggcaacgactcgctggcggatctggtgagggtggctctcactaagtccgatcgcggtgtccttaatgatgccgtgaatcggtatctggcccaaagggcggagagcttgaggatacgtaagcgaggcagtaagggcaaaagaaagagtaagactggtcgccactatggccaaacaacatctggcagtggtcaaagagctgcgctctttaaaaagcaccaggacctctttctgaaaaacaggcgaggattggcggagactatcttgtcggggaaggaggattttggtcctagacctgaacctcccgtaacaagtgtggaagagttctacggcggcattttcgagtcgccttctcctcccgataacgaacccttcgaagtccgtgctactggcgtcgaagacccccccccacttacatcaccatggacgaaataaaggcggcaagagccggttggcagatttcagcgcctggatctgaccaaataccggtcgcggccgtcaaaactatgtccgagctggaactggcgatactgttcaatattatattgttcagaaacgtccagccttcagcctggggggtacttcgtacgacgctggttcccaaagatggggatcttagaaatccggccaactggcggcccattacwatcagttctgccctgcagcgtcttttgcatagagtattggcggcccgtctttcgaagttggtctcgttgagttcgtctcagcggggctttaccgagattgacggtactctagcgaatgcgctgatactgcatgaatatttgcagtatcgcaggcagactggccgcacctaccasgtcgtgtctctggacgtcagaaaggcgtttgacacggtttcccactgctctgttagtagagccctgggtcgttttggtatcccctctgttatcagggaatacatcctggccacatttggcgcacagacgaccataaaatgtgggagcgttacgacaagaccgataaggatgctccgtggagtgagacagggtgaccctcttagcccggtcctattcaatcttgtgatggatgagcttctggaaaaggtcaatgagaaatacgagggcggctcactgcaaagcggcgaacgctgtgccatcatggcgtttgctgacgacctcatcctgattgctgaccgagatcaggatgtacccgcaatgttcgatgatgtttcgacatttctcgagcggcgcgggatgtctgtcaaccctgccaagtgcagagcgttgattgcgggcgcggtgagcgggagaagtgttgtgaggacaggcagctcttataagatccataacacgccgattccaaatgtcgacgccctagatgcatttaagtatctggggctagaatttggccacaaaggcgtagagcgccccacaatccacaacctctccgtctggcttaacaacctcagacgagcccctctcaaaccggaccaaaaatgcttattcatccggcaatatgtcatccctcgattgctctacggcatgcaaaatcctcaagttacctctagggtacttcgagaagctgaccgtctgataaggagacacttaaagacatactaccatcttaatgtccatactccagattctcttattcacgcgagtgtgagtgacggaggtctgggtataatggaattgcgtaaagcaattccaagaattttcctaggacggctagttaagcttctcaacaaaaacaaagattcggtcttaagttcggtcctgcagtctaaccgtgtgagaacactaatgggcaaattatcaaccatggcgggtgaagtaccggagtcgacgttttggagaaatcagattgcctcgggtcccctttcgaagggtctcgaacaggcggccgaggactccgcaagtcgactctggatcagcgagaaaccttccggttggtcgggtagagatcatgtccgtgcagtccaacttcgcacgggcaacctcccgaccaaagccattccatcggtgccggttggtcagagacgctgcagacacggatgtgcctgcgatgaatcgatatcgcatgtgctgcagatgtgccccctgacgcacgctgatcggattcgcaggcacgatgaagtggttaagaaagtagcccgccattgcacctcacgcggttggacggtggaagtcgagccacacattcgctctaggtgtggtaggctttttaagcctgacctggcagtccatcagccaggcggcgccattgtgatagcggatgtccaggtatcatgggattccgaaagcttgacggtaccttacgaacgcaagcgagctaagtacgacgtgccccaattccatcaggcggcacaacatgcatggccgggtaaggcacttacgtttgcccctgtaatagtgggcgcccggggcatatggccccggataaacaacgaccgctctgcggcgttgcagattcctccggtcgtgcgacgagcttgcgtaaattcggttgtcaagtgggggtcgtcgatccatgctacctttatgaggtcagtatgggcaaatcgactcaacccccgacccttaagggcttgaaaagagtggcagttgtggagacttccttcggacgtcgggtcggattttcggacgccagggtacctccaccgctgggttcacaaactaggcgaacatctgccgataccctctttaggtcataggaccacatgtctctgcacgagattaaccca

SEQ ID NO: 1097 - DNA, 4432 bp, Tinamus guttatus
  source 1..4432: mol_type = unassigned DNA
  misc_difference 423: note = a, c, t, g, unknown or other
  misc_difference 680: note = a, c, t, g, unknown or other
  misc_difference 704: note = a, c, t, g, unknown or other
  misc_difference 725: note = a, c, t, g, unknown or other
  misc_difference 1355: note = a, c, t, g, unknown or other
  misc_difference 1577: note = a, c, t, g, unknown or other
  misc_difference 1952: note = a, c, t, g, unknown or other
  misc_difference 2021: note = a, c, t, g, unknown or other
  misc_difference 2852: note = a, c, t, g, unknown or other
  misc_difference 3614: note = a, c, t, g, unknown or other
  misc_difference 4134: note = a, c, t, g, unknown or other
ctggggaccgtggttacaacccgggcttagctgcagagacagtacctccccgtggttcccgccggaccccgtaacatcgggtgactgaatctgtctctgccccgggagtagttcctccttgccctattgaccagcggtcgccggctgctcaatagtattctaggcgtgaaatatagcgatagtcctagtggttgtcttactgggccatagccccttgcttcaggggtcattcgcgaagtctctcaggagaactgggggtggtgttcttctgggtatagctaaaccccctagactgtgtccgatccatggggtcctggatcgtgaatttcgtttcggtggcgactcagacgggagaattccctgtggatacggccaggagggcacctgtgccggtaacatcataccctgagtcggaatgccacntaccgttgcccctgacattttgtaactcggatgtgactatttggggaggggttcgccctgaaccggtggactgcttgggwgatcttccrgaggygtatgatgcactcccaggggtggctgggcctcgggaaycggtgggtgggagcccgccgggrgaaggggtcaggtcgccagggattgcgtcrccctctggtactgcggtccaacatgattttgggagtcccatcctcgtaccgggagccgaagccgccgaggtntctaccccggtagtgaaggttccncaagaccatccagcatgtccntgctgtggtacgagggtggtgaaagtaacggcgttgtcagaacatcttaggagggcccacggtcggaaacgggtcctatttcagtgctcccgatgcgggaggatgaatgagaaacatcatagcatcgcgtgccatttcccgaagtgccgggggcccccagttgaggagggtcccctgggtgcacccgagtggtgctgtgaggagtgcgggcagaaatttaacaccaaaagcggcctgtctcagcacaaaagatctgtgcacccacttacgaggaatgtggaacggatagaggcagctcgtccgaaaggaaaagggaagcgtggtgcccacaaaggctgttggaccgaggcggaggtggcccagctgattgaactggaggggagattcaagaaccagcgatttatcaacaagctgatcgcggagcatttgccatcgaaatcggcgaagcagatcagcgataagagaaggcagctggcggcagcgaccaagacatcgtcgcccgagaagagggtaacgtcatcaacgagtggggagtcctcccctgaagtggaaaaggtggagggtatcaagagagaatatagaaggcgtgttggagagtggttgtgcgctgggtccctgmaggaccagacntcgttccagaagatcttggaagatgtggagagcggctccgagattgtcaccggtccgctggaggaactggcctcctttgcgagggggaagctcgcggcagctagagtgcgacatcatcgtaagcacccagctgaggccgtgcctgcgcgagaggagcagaggtggatgaagcgcagggtgggtcgtcggggcttgtacctcaggttccagcggctttttgcnttggatcgcagraagcttgctgggatcatcctcgacgatgtcgagtccatcaagtgcccccttccgatggaagaagtcgctgacgtcttcaggagaaggtgggaggaggtcgccccctttaccggctcgggctcattccgaagtttggggaaggctgacaacggtgccttcaagcccatgatctccgcyaaggaggtcatgaagaacgtcrcggagatgtctcgacgctccgcgcygggwcccgayggcctctccctgcgggatctgatgaagattgatccccagggcagccgcatggctgaattgttcaacctgtggctgttggcaggacgggtcccggaccaagtgaaggcgggccgaacggtcctgatcccnaagtcggccgatcccgggaagatcgggaacattgacaactggcggcccatcaccatcgggtccgttatnctcagaatgttctctcggattttgagcgctagactgcggcgagcatgccccattaatagaaggcaaagggggtttatagcagcccctggctgctcggaaaatctgaagcttctccaggcgctcatcaagagcgcgaaacgagatcataggacccttggagtcgtgtttgtcgatttggctaaggccttcgactccgtgaaccaccagcatatcttccaagtcctggtccagaagggtgtcgatgggcatattatcgacatcctaagagacctgtataccaacgctggaacgtatctggagtcaggttcccagcgatcgggatttattaagatcctcaggggagtgaaacarggggacccactctctcccatcctgttcaatcttgcattagatcctttgctgtgccgcctggaagatcggggcctcggttataagtatggagaccaacaaatawcatcgttggcatttgcggatgatctcgccctgctcagcgactcttgggagggcatgcagcagagtattcgggtggtagaggaattttgtcaacggaccgggctgcgggttcaagcgccgaaatgccacgggtttttgatcaggccaactaaagagtcatataccatcaatgactgtgacccgtggacgattgcagatatgcaattggatatgatcgatccgggcagttccgagaagtatcttggcctagggatagacccatggattggtctatcgagaccggaactgtccgaggtgctgacccgctgggtgaagaacatcgggggcgcccctttgaagccactccagaaggtggacatcttgaggagctacgccctnccaaggctgctgttcattgcggatcacgcaggcctgagcgccacctgtttgcattccctggacctttcgataagatctgccgtcaagggctggttacatctaccgcctagtacgtgtgacgctattatttacgtcagctacaaggacggcgggctgggtcttccccgtctggcgagcctaattccaaatgtacaggctcgcaggttggtgcggatcgcccaatcggaggatgatgtcatcaggagtgtggtactccaggagggtatccaggaggagatccggaaggtctggatctcggctggggggcgaccggagaaggttccatctgtgacgggggagttcccagtgatggaggctcaggcggctgacgaggccctatccgagtgggagaggcgagctccacgaaccatctatcccattccctgtaagtggaggaagagagaaatggagaattggaccaatctaaaatcgcaaggccacgggattcggaattttgaaaatgaccgaatcagtaatgattggctcctgcattatggccgcattccccaccgcaaactaataacagctatccagttgcgggccaatgtctatcccacwcgggagtttttggcccgcggcctgggcgagggcgcacccaggggatgtaggcactgtcccgcggagtgggaatcttgttcccacataattggctactgcccggctgtccaggaggccaggatcaaaaggcataatgacatctgtggtgtgctggctgaagaggcnagaaagctgggatgggtgatatttatagagccccatctcagagataacaccaatgagctcttcaagccagatttggttttggtgaagggatcctgtgcgaaggtagtggatgtaaccatccgctacgagagtgggttaaccaccttgagtgacgccgcggcagaaaaggctaggaagtatcaacatctggcaggggaggtgcgggccctaacatcggccactactgtagacttcctgggtttccctattggcgctagagggaagtggtacgttggtaataatggactcctttccgaccttgggttctccactagccgtgtagtgcggatagcgagggccctctctaaaaaggctctcctatcgtccgtggacattatacatatttttgcgtctcgcgctagacaggcccaaacgtccgagtagggggcttggcatttctcattgcctgctcctgaaaggatatgggtcctgcgtcgcgtggtaggcagacccattcgtccgagtagggggcttggcagtntccattgcctgtgcccgaaaggacgtgggtcatctggtctgtctgcctacacctctctagacttgtaacatctagtctgtcaacaagatcaaaattcttcacacagacgaccgagcttgctcagtcttcctgtacccgcagaattttgctcttgctctcctttggctgtgtcctggacgtgggactattccatctcgtcccaaatgccgcgtccaattataccggatttgacaaagcggacggcccgctttataagccggaaaaggtgccttgtaaaattgcaaggttcattaaatag

SEQ ID NO: 1098 - DNA, 3690 bp, Trichinella spiralis
  source 1..3690: mol_type = unassigned DNA
ctcctgactaacctgatttcgtccgtgcggcggcgttttcttttcgctctccgctcgtcgaaatttgctgtagttgattcgcttttctttgcgttttcttctactttcgcagttttttctgcattgccacgatgtcaaaccgccttgccaatactgctgcggctggtggggttccagagaaaacctcgggaactttagacattcctggccaaccctcttcatccggtgaaaagcgtgcgatctcttaccctggtccattcggttgcaattcgtgttcgtttacgagtacgacttggctctcattggaattgcattttaaaagcgtccataatattcgtgacttcgtcttcctctgctctaaatgtaaaaaaagctggccatcgatcaactccgtagctagccattaccctcggtgcaaaggtagcgtcaaggctgcagttgttcctacatctttggcgaatacgtgcaccacgtgcggctcaagcttcggtactttcagtggtcttcaactccatcggaaaagagcacatccggacgtttttgctgcttcttgtagcaaaaaaacgaaggcgcgttggtctaacgacgaatttacccttctggcgagactcgaagcaggtctggatccagcctgtaaaaacattaaccaagtactagcggaaaggttaatggagtataacatcaccagaggcgtagaaatgataaaaggccaacgtagaaaagatcagtacaaagcgctcgttcgtcaactccggtcaaattctgaaacacagcaatgtgtaggtttagccggaagtatggattcgaacgtaccggccaacgatacatcgtcttccgttgcatcagaggtcagcattacgtaccctgagtacggggccgtgatgtcgtgcgacctaattaaagaagcgactggtatggccatagttgacatcaacgagttgcaaagcaacttacgaaaagccttcttgtccggccgcaagcttcccatgaagttccatggagcgcgtgaaaccgcccagaagaaaatggccaacccccgtgttgcgaaattcaagcgtttccaacggttgtttcgaagcaacaggaggaaactggccagccacatcttcgacaaagcctcactggagcaattcggtggcagcatcgatgaggcatctgaccatttagaaaagttcctctcccggccaagattggagtccgattcttattccgtgataagcggtgataagtcaatcggagttgcacatccaattttggccgaggaggtggaattggaattaaaagcctcccgaccaaccgctgttggtccggatggaattgcactggaagacattaaaaaactcaatacttacgacatagccagtcttttcaacctctggctaaaagctggcgacctacccgcatcggtgaaagccagtagaaccatctttttgcccaaaagcgacggcaccaccgacatatcgaactgtcggccaatcacaatcgcatccgccatgtatcggctgttcagcagaataataacgcgacgtctggcagccaggttggaattgaacgtgcggcaaaaagcgttccggcctgaaatgaacggcgtattcgagaactccgccattttatacgccctcatcaaggatgctaaggtcaggtcaagggaaatttgcgtaactacgctcgaccttgccaaggcctttgacacggtgccccactcacgcattttacgagccctgaggaaaaataatgtcgacccggaatccgtcgacctgatttcgaaaatgttaacgggtacgacttatgcagaaataaaagggctccagggcaaacttatacccattcgcaatggagtcaggcaaggtgaccccttgtcgcccctattatttagtctatttatagacgagataataggtcgcctacaagcctgcggccctgcctacgatttccatggcgaaaaaatttgcatcctggctttcgccgatgatctgacgctggtggctgacagcgcagctggtatgaagatccttctaaaagcggcttgtgacttcctggaggaatctggaatgtcacttaatgcagagaaatgccgcactctctgtattacaagatctccccgaagccgcaagactttcgtcaacccagctgccaaattcatcatcagcgattggaaaacgggtatcagctcagaaatcccctccctgtgtgcgacggacacctttcgtttcctggggcacaccttcgatggagaaggaaagatccacatcgatacggaggaaattcgatccatgctcaaatcggtgaagtcagctccactgaaaccggaacagaaggtggctttgatacggtcacaccttcttccccgccttcagttcctgttttctacagctgaagctgacagccggaaagcctggttgatcgattccatcatcagggggtgtgtgaaggagatcttgcactcagtgaaagctggtatgtgcactgatatcttttacataccctctagagacggtggaatgggatttacttccctcggggagttttctcttttcagcaggcagaaggcactcgccaagatggctggatcgtcggaccccctctcgaaacgggttgctgaattcttcatcgaaaggtggaacatcgcccgtgacccgaaagtcattgaagctgctcggcgcgtctaccagaaaaaacggtaccaacgctttttccagacgtaccagagcggtggatggaatgaattttcgggaaacactattgggaacgcctggttgacaaacggccgtgcccgcggaagaaatttcataatggctgtgaaattccgttccaacaccgcagccacccgggccgaaaacctacgaggccgccccggcacgaaagaatgccggttttgcaagagtgccaccgaaactttggcacacatttgccagaggtgtccggcaaatcacggcttggttatccagcgccatgacgcagtcgtaacattcctgggggaagtggcgcggaaggaaggttaccaggtcatgatagagcctaaggtgtcaaccccggtcggcgcgctcaagcccgacctcctactcatcaaagccgacactgcattcattgtggatgtaggcattgcatgggaaggtggacgcccactaaagctggtcaacaaaatgaaatgtgacaagtacaaaactgccatcccggcaattttggaaacatttcacgttggccatgctgagacgtacggcgttattctgggcagccgcggatgctggctcaagagcaacgacaaggcgttggcatcaattgggctcaatatcacacggaagatgaaagaacacctgagctggttgacgtttgaaattatatttataactcaaataagccggatttataactcattcatgaaaaaatgaggtttttgttttcttttttccttttaccattcttgttccattgttgttatttgctttaatcctgtattttaccgccggcaattccattgttattattactgttactgttattattgttactattgtttttacttttacttactactgttattatactttaattcgttaacttacgttattgttaccactacttactttgctctctcgcaaacgttcgttgttgtttcttttggaccaggtttagagaaatcgcacgcacagcggaactggaccgcttaagccagaaatagtaaagtaacaa

SEQ ID NO: 1099 - DNA, 3894 bp, Tetranychus urticae
  source 1..3894: mol_type = unassigned DNA
ctctcttattttaacatattcgatgtactcgtacattgaatatgcttttattttttttcaaagttttttgggtgcatacccctggaaaattctgagatgtataaatctcccatcagctttggctgaaacgttggctaagttttgtaggttgtttgccccctactacttagtcgcaaatggtatttgctaacagttgttaaattgttacatttacaagtcctatccagtgcctcctcgtggcgctacccggtaacacttagagtaatctgagtggctaaactggaagggcggaaaatgcaaacaggcggttggtagatgcttcggcattttgccaaaaatccacggctttttagcccaacaacatcagggtgatggacccgccagcttgtggtcaggatcccatccatgaataaagcatggctctgcttctggtgcatcctcaacgggatcggcttcggctggatgtaagtcttgcggaggcatgtgcatcttgggtggcctaacaagccattcaagagaaggagggctctcgcgagggagttctcaacttaagaccgttaagccacaaaacgaagaagataatggaactacccagttgaaggctgggagtgcggactctttcccaaggccaagtggtgatttgaacccagaggaaccactgagcattgatatctgtccagtttgtttcagacagatgaagagttatttaggcgttagagtgcatatgcagaagatgcacttagaagaatataatgcgtctattccggacccagtcgtttcccacactaggtggtccgatgaagaggcagcacaattagcttttactgaagctaagattgaggtcgacaagcttttacctcgtggcaaaggcataaataagttcctgttagagcttttgcctggtcgaaccttagagtctatcaagtctcacagaaaaagacaatcgcataaagacttggttcgcaaatatgtaaaggagttcgttgatactttagctgcagataacgatgacgataccatcatctgtcaagataatggtgacatttttaatgaccccatcgttggagcaactgattctcagtctgagactgaaactgtggctgatcctgctgaattcaagacttttattgagttagcagacgatcccacaaaaccaaaagtcgtagcaaaactcagaaacttgataaaagataaaccaaagagcgagatccttggaagtgacattcttgtacgaatcctgcgaagaactcttcatggcttgcctgttgaggacgagttggaccagtacttggaggtttacttcactgggaagataaagcagagacgttctaagacacaaactgccttatctaagaaacagattaagcagagagattatggacgtcttcaggagttatactcccggtctagaaaaaggtgtgcaaatgagatcttgaaccctacttctatgagtggtggttttggtcatcaggagctatccgaattctggacaaagacgttcggaccagatgagcaacctactctgggcgaggtggagatcattccgaaggagaactgttggtgggatattttctcgccaatatcttcagacgaaatcaaagcctcataccccagtatagggaaagctgctggtccagataatttctctgcttatcaacttagaaaagttccggtttggcatctggaatgtctctataatatctttgctttctacaaggacataccgagtagacttaaagacgcgaagacaattttgataccaaagaaggataacgctgaaagtccaggtgatttccgccctatcaccttgagctcaattatcactcgacattttcacaagattctagcgacgagagtgaataattttgttcgattccatcctatgcaaagaggcttcattcaatctgatggttgtttggagaacactgcgctcatacagacggtcattagagaagccaaagtgcgtaggaagcaagtgcatatcaccttctgtgatgtgcgaaaagcgtttgacagcgtccggtatgactcgatcatagcagctattgcaaagaaaggtgcaccaggaagtttcatcatgtaccttagtaacttatatagaggaaataagactacgcttttgactgctggcggtgaaacaagaataactccaacacggggcgttagacaaggagatccgttatctccgatactttttaattgcgtgatggaccagattctcacggctcttccttcgagaactggttttacgttatctgctggtgacgaatcagttaacgttaactgtttggcgtttgctgatgatataattttaatctcaaagaccaagaatggacatcaagaactccttgatgtaacacaaagaattttaaaggagaatggcctcgatctcaatcctgataagtgctgttcgctaagcttgataccgcacagcaaaacaaagaaaatcaaagtggttcgtgctgacttcgtggtgaacggagtcaaagtgcgatcaatgagtattggtgattcaacttgttacctaggtgtctcaataaatgtaactggccaagtagcaccagttaaaatgtatcaggctctgtgtgagaaacttgatagtgctgctattaagcctcatcagagactgtacatattgaagcatttcgtaataacgaagatgtttcacccgctgattttgtcaactattgcggcacacaagataaagaatctggatttgattagcagacgttatgtcaggaagtggttacacttacctcatgattgcggatctggtatgattcatgccaaagtaagcgatggaggattgggtgttccattactgttcaggacaattgctgatctcaaagttcggagaaaagaaaagctgcaggtccatgaaaacccaatatttagaatattggcaaagctatctacagtaagcaaggagttggaaaattgtaaaaagatagcttccaagacgacagacattcaagaaaagactttcaaggaaatgcttgcgacttatgatggtttgtcattgaaagaagctcgagcggtacctgaggtgcacaaatgggtggacagctatgataagcgttataagtttgcaggccgagatttcgttcaagttatacaggctcgtttcaatgcgttaccaacgagatctcgagtatggcggggcagaggtgctgatgaaaaatcgttacgttgcagagcaggctgcaacgctagggaaacgttgaatcacgtttcacaatcttgcttcaggacgcatcgagtacgaacagctagacacgacaaaatcctggattttatttgtgaaaggctggacgtagtcggtgttaaatacgtacgagaaaagccaatcagctttcctggcaaaaagttgattcctgatttgattgtggaaaacacggaccaagctcttgtgctcgatctccagattgttggcgataacagtgaacttccacttgatgaaagaggcaagaacaaggttatcaaatacaattgttcggagatgcaggaattgtacaagaggaagaaaaagactttggcggttaaggcactcacgctacattataaagggttgatggcaccggaaacaagcaatatcctaaggtcattcggattcaagtctaaggatttggaaaagatggcgtatatggcgttgtttggtacggtggctgcttggggcattttcaatcgctcgacggagacaatgcgttcagtcgctaactggcctagacctgaggaattatgatgtatcccttcaatatattgtaatcctcattcgtccctatcctttcatttgataaaagaaactttgttgctccttttaatagttggtccctcctgtcccttttctggaacctggttgtatcgattattgaaagttgcaataaacggatttaa

SEQ ID NO: 1100 - DNA, 3554 bp, Drosophila willistoni
  source 1..3554: mol_type = unassigned DNA
  misc_difference 3536: note = a, c, t, g, unknown or other
gaagctgggaagctgggtcggatgagcgcagaaggggtgttcttcggagcactgtaattcataagtcgtaagtctgatcaagtcgactcggaacctcttcgtggtgtttcctgggtgctgttgagttcctagtctctaggttctctccagtagctaattcgagcggcgaagcaactcttggggttaccagaaccttgagccaagtaacgttggtcaagatatgaatactgtgcctcggataaacaacacaacaacaactccagcgacttcccgtcctggagaccaaccgagagaggctatagcagtggtaaatctcgcgggagagattccctgtgcagtatgtgggcgcctcttcaatactagaagggggtttggggttcatatgtcacatcaacacaaagacgaactagatacgcaacgtcagcgtgaagatgtaaaactccgatggagtgaggaagaagcgtggatgatggcgagaaaggaggtggagctcgaagcaagtggtaatttgagatttcctaataagaagctagcggaagtatttactcaccgtagctccgaagcaattaaatgttttcggaagaggggtgaatataaggcaaaactggagcagatcagagggcaatctactcccaccccagaagcgttggactcaattacctcacagcctcgccctagtttactcgagcgaaaccaccaagtatcatcgtcggaagcgcaaccaatcaatccatcagaagaacagtcgaactgggaaatcatgcggatactacagggctatcgccccgtagaatgtagtccccggtggagagcccaggtcttgcaaactatcgtagatagggcgcaggccgtagggaaggaaaccactctccaatgcttatccaactatctcctggaagtatttccattaccaaacgaaccacacaccatcggtcggagcaatttgcgaagacctcgaactaggagacagttaagacaacaagagtacgcacaggttcagcgtcgttgggataagaatactgggagatgcattaaatccttgcttgatggaacagatgagtcggttatgccaaaccaagagataatggaaccctattggaaacaagtaatgacgaatcccagcacatgctcttgcgaaaacacaagattccgtatggaacattcgcttgagacggtttggtcagcgataacgccacgcgacctgagggaaaataagttaaagttgtcaagtgctccgggtcctgacggtatcactccaagaacagccaggagtgtacccttaggcattatgctacgcataatgaacctgattctctggtgcggcaaaataccattctctacccgactggccagaactatcttcattccgaagactgtgacggcaaatcgaccgcaagactttcgtccaataacagtcccctcggttttggtcaggcaattaaacgctgttctggcttctcgattggcttctaaagtcaactgggatccaaggcagcgcggtttcctacctaccgatgggtgtgctgataatgcgacgttggttgatctcattttgcgggagcaccataaacggtggaagtcatgttaccttgcgacggtggatgtcagcaaggcttttgacttagtatcacaccaggccattatcaagactttacaggcctatggtgctccaacaaactttgttagctttatagaagaacagtataagggcggcggaacctccctcaatggggcaggatggagttcagaggtgtttatacccgcgcggggcgttaagcaaggtgaccctctgtctccactattatttaatcttatcattgatagattacttaggtcctaccccagagagattggtgccaaagtcggaaataccatgacaagcgcggcagcgttcgcggatgatctggtgctatttgcggaaactccgatggggcaaacattgttggataccacgctaggcttcctagcctccgtgggactctcccttaatgctgataagtgtttcactgtcagtataaaggggcaagccaagcagaagtgtactgtcgtagaacgacggagcttttgtgtaggggagcgcgagtgtccttcattgaagcgtactgaagagtggaagtatttaggtatccggttcactgcggatgggcgggctcaatatagtccagcagacgacctcggtccgaagctgttaagattaacaagagcccctctgaaaccacaacagaagttatttgcacataggactgtccttatcccacaactctatcaccaactaacacttgggagtgtgatgataggcgtcctaggaaaatgtgacagattggtacggcaattcgtaaggagatggttagatctcccactggatgtaccagttgcgtactttcacgccccccacacttgtgggggtctcgggattccgtcaattagatggatagcaccgatgcttcgtctgaagcgattgagcaatattaaatggccccacctcgaacaatccgaggtagctagctctttcattgacgacgaattgcaaagggctcgagatagattaaaggcggaaaatgtgcagcggtgttcgcgtccagagattgactcgtatttcgcaaataggttgtacatgtctgttgatggttgcggtctccgtgaagcaggtcattatggcccgcaacatggatgggtgagtcagcccacgcgcttgctaacaggaaaggaatatttgcacggtgtcaaattgcggataaatgccctaccctcgaagtctcgtacgacgaggggaaggcacgaattggagagacggtgtcgtgcaggatgtgatgctcccgagacaacaaaccacatcttgcaaaaatgctatcgtacgcatgggaggcgggtagctagacacaacagcgtagtaaatgccgtcaagcggggacttgaacggaaaggctgcgttgcccatgtcgaaccaagtctgcaatgcgactcgggcttaaataaaccggacctggtgggaatccgacagaatcacatttatgtgatagacgttcaggttgtgacagacggacattccttagaccaagcgcaccagcgcaaggtcgaaaggtacgacagagctgacataagatcacaaatgcggcgatttttcggagtgacaggtgaaatcgagtttcattccgttacactcaactggagaggaatctggagtggtcagtcggtaaaacgattgattgcaaaagatctcctcatcgctgaagataccaaactcatcagcgtcagagcagtaaacggcggagtgacgtcttttaaatatttcatgtattgtgctgggtatactcgaagctagatgtactaacctctagtttctctatacttttgcctgctaccttggcattacatctaaaaaggtacaaacatcgcattggcaaaaagaggtggttttagtacataggcgctgtgggacttcattgtcccgatgatgcagcgaatcgtgcatacgagattgtccagtagttggttgctcgtatctttagaagatttccttcctcggcgatcaaaanaaaaaaaaaaaaaaaaaa

SEQ ID NO: 1101 - DNA, 3955 bp, Petromyzon marinus
  source 1..3955: mol_type = unassigned DNA
cggtgcgttcccttgggtaaggaacacgagtcttagtggccttgacctccacgtggtcccgctggtaacatcatctcttgatgatggctaacaaggctaatgcacccattccatctcctatctcgcatggaggccgctatgcgtgattactagaggccacaaacaaaacttatgactgacaaacttaagttctcaagccagttggcacgaggcctggcaaaacaacgtgctatggatggcgctcgggttggcgatccacccattacagttagacccacagaaaccgatctgtgcaacactgagggttcatggggacgccgtcctatgaaactcttgtttgtctcggtgtcaacccagacacagaatgaagatgccctctgggcatctgatgttgctaaacctatggcgtctaggtcggcgctaaaaatgacgagtataccttccatgaccttccataactcgtccttggaaaaggaagaggagatgaactacgatttttacgaacagattaaaagtctagttgagtcggatgactcttcagatgactttacagaggatgatgaggatgtggaggagtccttcctcgacatatcggctgaggaacccgtgttgggaaagtttcccattgacaccaagggaactatcacggttgtactgcctagtctggagtatatatgcgttatctgtaaacaacacatgggcaaagcatccgaacttgttgcacattttaacatcaaacacagagacattcctctggtgtttaagtgcgctaaatgtgacaaaaccaactcaaaccaccgatcgattgcctgtcatgcccccaaatgtgggggaataaagttaactgaggaaagcttaccaatggtctgtgaatgttgccaggcacgctttgcgactctaagtggcctttcgcagcacaagaggcatgctcacccagtcacccgtaatgaggaaaggattaaagatggtataaagggtacctcgcagagaggggtacaccgtagctgctggtctttgaaggaagtagaacagctggcccttctagagttgcagtttcaggggaaaaagaatatcaataagatcattgctgaagcgcttgggactaagaccaacaagcaagtctctgacaagagacgggacctaagtaaaaagacaggggcccccatgtcagacagcttacatttttcttctaggcctcttgagacattgtctcccccaccaaatgtaacaacggggacttcatccatactcgctcaagcagctgagcggcttacgaatgagaattctgggaccctggaaaagcctgcaatggaggcaataaaggcttggcttaacggcgagggccaacatgatgccctcgtagaaactgccacagcattgatgctttgtccgatgagattggtgaaaaacaaaggcaaacgttcaaaacccgagaacgacattattaaacccaggatattacccacacgatcttggatgaagaagagagcggaaaaacgaggaagcttcatgaagcaccagaagctcttctttaagaaccgctctcttcttgcgtccttagtcctggatggcactgaacgtcatgaatgccgaatcccgaacgcagatgtatatcgtttttactgcgaaaaatgggagaaggtgttgccattcaatggcctgggccaatttaagtcatcaggtgttgcaaataacgaatactttgagcccctaatttcggtggaggaagttcagactgccatacgggccattaaaccaacgtcagcagctgggccagatggcctaacaagggctgcaatctgtgctgccgaccccgagggtcggacactgacagccctatttaatgcatggatgattacaggaattattcccaaagagttgaaaaagaataggacgattcttattcctaaggttatggacgatgaaaagctgaaagaattggggaactggagaccaataacgattggttcaatgattctgagattattttccagaataatgactgcacgtcttgctcgtgcttgtcccttaaacccaaggcagcgtggttttatagcggcatctggctgctctgaaaatcttaaggtgctacaggaccttatgagacacgctaagaaattgcacaggccgttggctgtcatgttcatcgacatagcgaaagcttttgactcggtttcgcatgctcatattttatgggtgttaaggcacaagaaagtagatgaacacgtggtgggcatcatccagaacgcctacgatcggtgtacgacctcgttcaaaagcaatggcgagtcgactcgagaaattagcatacgtgttggtgtcaaacagggtgaccccatgtcacccctgctcttcaatcttgccatggaccctttgatatgcaccctagagtcacacggagttgggtactccattgataccgaccacgtgacagctcttgcgtttgctgatgatttggtgttggtgagcgaatcttgggttggtatggccgccaatctagcgatcttggaatcattttgtgggctatcgggattggaggttcaggccagaaagtgccagggcttcatgataagcccaaccaaagattcatatacggtgaacaactgcgacccatggactatcaaaaataaagatgtccatatgatccaacctgatgaatcaacgaaataccttggtctaaaaatttgcccttggactggcattatacggtcggatctacatgttcaactaaagacacggatctcgaaaatcgatgaggcgcctctgaaaccgactcagaaggtcgaactcctcaatgcctacgccctacccagattattgtaccctgctgaccactcggactgcaagcaatcaactctccgtgtgttggaccaagaaataataaaggcggtaaaaggatggctccatcttcccgcgtcaacctgtgacgggctgttgtacgccagagcccgagacggaggccttgccatcttgaaactggaaaatgcaattccttcggttcaagttagaaggctgcaacgtattgcaaactcctctgacgctatcgctcgaaacattgcgtcctcgcagggtgtggaggaagagtaccgaagtctgtgggtacgggcagggggtgacagcgaagcaatcccaacgttctttctcaggggttcggaatcaaaagagcccgtgtatccgagaccctgcgattggaggaaacgcgaatctcggagacggtgcgaaaagccggttcaaggaaggggcattgtaaactttgcgcaagatagaatcagtaatgcatggttggggccacggtgcggctttaaacaatgcttctttatcgcagcattacaattaagggcaaatatttacccaacaagagaaagcataaacagaggcagagatggtgcctcacggtcctgcaggaaatgctctgccaggctggagtctctctcgcacattcttggtcaatgtcccgcagtacaaaaattcaaggattgcgcgacgcaataagatcagcgacattctagctgacgaagcggcgagactgggctggtgggtgtacaaagagccacggttcacatctgaagccggagagctaaggaaacctgcccttgtgtttgccaaaggtgaggaagcgcttgttattgatgtcaccgtccggtttgagctctcgaggaaaacctcatcagaggctgcctcgcaccaagttgcgtactacacccccccttgtgatcaagtcaaagtgctgacgaaggcaagcaatgtcacattctttggattccaggttggggcaagagggaaagtggccccttgagaataatgaggtgctaacctccctgggcctgaccaaacccagaacacatcactggccaagatgatttcccgcagcacgttgcttttctctctcgatacccgagaatgttctgcggaactacgcagtctatgaacagtcacagacaacctctgatccaag

SEQ ID NO: 1102 - DNA, 4002 bp, Schmidtea mediterranea
  source 1..4002: mol_type = unassigned DNA
agtcatagggtgaactgcaattctgacacgatgaccgagctgtgtcagtttgcagctagtcgctaaagactcgatcagtccgccaagtgaggtggccgggtatctgcagcactagagccactggtatcaagagcagagatacgcgagtggaagttgagtacgactaccttcacggggtcctcctgataaccacagtggactgtgggaactaaatgtgtgctcagcgttccctactttctcgtagggtaaagggtatgataacccagagaatatcccatgggagatatccatggaaaaagcaccacgttagacaatccgatggtctaactcggctccgaggggctaactatcccaaagggcttaaagaaaagaactggttacaatcaaaaatctatttgaagagtcaggtgccaccgcgcctgcaccagttcccctagaagttgcagttgaggtacaccagtcatcgagtgttcccgagataaccgacgaatctacgactactcaggaaggaagctattcagaaccaccgatacaccgatgtgagaactgtggaagagaattcagaacaagagcaggagttcaacagcaccggagaaaagctcacaccaacgagtttatggaggagaaagagaaggcagctccaaccaagaagcttcgatggacagacgaagaaaaagagatcctcatcgaaagcgagataaagatcatcaaggaaggatcccttaaagaacaacacgaaataaacaagattctagcttcaagaatgcctggaagatcacaagacggaatagccaaaattcgccagaaacaagagcacaaggctgaaatacagagaaggctacatgggaccgtcactaccaacgaaaccagaggaaacagaaccagcgaaattaccgaaccaataagaagcttaccaataaacaccaaaacctggagcgaagacgaaatgaaaagaatgctagccgaagaagtgaagttgagaaccaagaatgaaaaggatatcaacaagaagctagcagaaatattcccgaacagaacaatggggtccataaagagcaaaaggacgaaagataaggactaccaggatttggtaaagctaacaatgcaaacaatcagcgagaacccagacaatgaaacagacttcaataccagcaacacggaaaacaacagcactgatgcagagaaagaagtgaagaactacctcaatatgctactactgaccatcaacgaggaagaatggttgacatccactctgaaggaagcagcaacactagcactacaaggaaagaaaactgaagcatctgaaaagcttaacgagtatgcaagcaaaacgctgttccctggattgaaaataactaatcagacgaggaaacgagaaaagaaaatatcaaaaagagaaaccagaaggcaagaatacgctgaaatacagaaactctacaaaaagaatatttcaagcgcagccgaaaaagcaatcaatgggaaatggtccataaaacccgaagaagaataccacaacaataaggatctcattaaagcatggaaaccaatactagaggcacctccattcagtgactgtaggcccatcgaaaacatcaaggaaatggactacgctttaatggagatcagcacggcagaaatcttcctcgcaataagagccatggggaagactgcaccaggacctgatggcattaaatattcaaagctcaagaaaaatatccaatcaatggcaatattattcaacacatgcctactaacgagcttcctgccactcccattgaagatagcaaggacaatcctgatacctaaacaagagaatccaggtatccttgactatcgaccactaacaatagcctcagtggtgacaagagtgttccacagtatccttgcgaagaagctcgacaacaatgcccaattaagtcaacgacaaaaaggatttcgaaaatgtgatggagttgcggaaaatatagtaatactcgaaactatattaaccaacagcagaagtgaaaagagaccgctctgtatggccttcgttgacttaagaaaagcattcgattctgtgggacatgagtctatcatcagaggagcaaaaagagttggagtgccaccaatgttgctcgagtacatttcktcaagttaccagaatgcgtctactaacttgttcggcgaaatactcaactcgagaagaggagtcaggcaaggcgaccctctgagccctattctcttcaattttgttatcgatgaagctctagaaaacctcaacaggaatattggatatctactgaaggaagaaaaagtgagttgcctagctttcgcggacgacatagtcctgatagctgagacaaaaggaggcctagagaatcatatcgagaaactattagagaagctgaatggggccggtctcgagttgaacgcctcgaaatgcgcaacactgatggtgatgaaaaacggaaaggaaaaatcaacgtatatatcaacaaaagcaatcaaaatcaaagaaaatgacattccaacaatgaaagccacagaaacgtacaaatatctcggattgcaaatgggtttcaaagctagagaacagaatgctaatgaggttattacagaaggactggagaatataacaagagcaccactgaagccccagcagaggatacatatcctacgagacttccttataccaagattaatacacaaattggtattaggaagagtggccaagaagtcattaaaaagaatcgaccagaatataagaaagaaagtgaggaattggctacatctccctaaagacacgacagcagcattcatacacgctgatgcaggagatggagggcttggagtaccagcgttagaacacacaattcctctactgaaaagagaaagaataactaatctaagaaaatccaatgatccagttaccaaagaatgcctgagaatggagtacaccaaacaagtactgggaaaatggagtagaccaactaaaattggagaaactctggctaccaacaaaagccaactaaaagaagcattcagaaaacagatgttaataacgctagatggaaaagggctaaaagatcaccacgaaacgcccactatccacaaatggatcagaagaggagagaacatgaccggcaaacagtttatcacagcagttaaaataagaggaaaccttgtggcaactaagtcaagaaatagcagagggagacccgaacaagagaaactatgtgaagctcaatgtggacgaccagatagcctgggacacatattacaaggttgctggagaacacatggtatgcgagtggaaaggcataacaacatttgtcgcagaattaaagcaataatgaaaggaaaggaaagcgaagtagtcgaagaaccaagactacaaacgaatgaaggtctcagaaagcctgacttactgatctgtcacaaaggtaaaataataatatgcgatgcacaagtagtggcagatagctcgaactgcagtcttgaaagcgaaaaccaaagaaagatagattactacaagaaagattcagtagtatcagaagcaagaaaacttatcggacgtgtcgacgaagatataattataatggcagtgacctttaactggagaggagccatctcaaaaacatcaataagagatttggacatgcttctagatataaaatcaaaagaagtaattaaaatgtcaaggaaaataatcagagataatagcatcatggtggagatgcacagaaaccggactgagaaaaggagatagaagggaaacaaaggaaaaacgaaatgactggaaactatgaaggatatagctgaaagccgcaaggaaggctaagtcctgaaaccgatctacatcttcgatcccaagaggaactgtgggttaagcttgagccgacggaaaaagcgaatgcatgttagacgacgaggtacagtcacctcctcgtggtatttggcgggcaatgctcactaaattaactgtgagtagctgagaactgtatgtgtatcatgaaaaaaaaa

SEQ ID NO: 1103 - DNA, 4161 bp, Tribolium castaneum
  source 1..4161: mol_type = unassigned DNA
tggaagaccccgcccatgaggcttggagagtgtgatcctgatcacacttgaaaagttatgctgagtacgtcgtgagagtcggtaactgtcccaggatggtctgggataggctaaacctcagcaggggaaagttgtaggggcctgccacccctacacttttatagatatggcattcgatacctcaaatagagcctcggacttggaggagcatggttcccctcctcctcgtactagacctggaaccaacggtcttgacaaccccattggacctacgggagcggaccatgctcatggacatggattccgaagacgaagcgggggaacacggaccccccgccgataatgctcacttaacgtcaggcgaacccatcgaaatcatcttgatgttaccctttcaaagcaggtcatgcggcatatgtctcaatgccggaaagggtggctcccgggcgtaacggacatctatcgctgatggaasctagctcgctcttgaagaacggcggacggggacttggaatcgtggtgtggttctgatgtaagtcctgaaattatggcgtgatggcccgcccgcccgaccggagggacttagaacccccttccgcgagggtcctgtctgtaggtccwccatctccgtaaaacgagttggaggaaaccgcagacggggatgaagagtcgttcgttccgtcgcatcggggattgcgcagctgggtcaagtcggcggggtgttcggctaacgggcaaggctgggcgtgaggggaggtttgcagcttcccctcacttaagcccacgttatcttgcaggctcggtttcaggtaatgttccttcagttccccccggccccggcctgggggccggggctcctgcatttgctgctggtcggaatgccgatggggggcccgcccaaaatccgtgcccgtattgtgcacggtcgtttactaccgccaatggccgcgggttgcacatacggagggcgcatccagacgaggctaataacgccatagacatcgaacgcattcatgcccgctggtcacacgaggagacagccatgatggccaggcttgaggccggtgccatccagcgagggggtgtaaggtttatgaaccagtttctggttccgcgcatgccgggcaggactctggaagcggtgaaaagtaagcgcagagatgcgacttacaaagcactggtccagaggtttctgcaggcgccgcaaataaacctccccgaactgcgtgatggtgatgcgcctcgtcagcctgatcctcaacaggaaaaccctcccgagcccccttctttcgatggggcgatcaggggcgctgtcgccgaccttgtcggaggggtcgactggcagcgcctcgggtttcagggagaccgtctctgtaacatcgcgagacgggcttgcgatgggggggatgtttcgggccagttgctgggctggctgcgggatgtcttccccgtcaagagggttagtactagaggggatcagagcgacctagatgtcgacggcgcattggtgagcaggcgcacggcgaggacaagggagtacgctcgggtgcaggagctgtaccggaaggaacctaaggcgtgtttggctcgaatccttggtgatcgtcgagagggggccaatcgggctcctaatcgcgatcccgcattcatcgatttttggcgaggcgtcttttcggaggcgtccgctgaggtcgagggatgggcggaggaggtctccgaccatggtgagctggcacgccgggtttgggaccccatctctgtcgaggaggtgggaaggtctcgggtccggaatggtgcagcgccggggcccgacggaatagcggtttccgtgtggaacaagcttccgccggaggccgctgcccttcttttcaatgtgctgctgttggggagatgtctgcctgcagaactcacccgcacgcgaacggtctttattccaaagaccgacgcaccgcgaacacctgcagactatcggccgatttcgatcgcgtcggtagtcgcacggcacttccaccgtgtcttatccgcacgtgttcaacgcattcccgacttgttcacaaagtatcaaaggggcttcttaagcggcgtggacgggatcgcagataatctctcggtccttgacacaatgctgacgatgtcccggagatgctgcaagcatttgcacttggccgcgttagacgtgtcaaaagcatttgacactgtctctcactttgccatagtgcgtgcttgccggtccatatttgggagtgcggagaccgtgttggaggagggcgggaggaggcacttcgtgcaagtgcggygtggggtgaggcagkgagacccactctctcctctcctctttaacctggtcttggaccgggctctgaagaggctgtccaccgatgtgggctttcgtctaacggatgcgaccaaagttacggcactcgcttttgcggacgacgtcgttctgtgcgcgaccaccgctagaggactccagaccaatctggatgttctcgaagcggagcttcgcctagccggtctcttgttgaaccccaacaagtgtcaggccttatccttggtggcttccggacgggaccacaaagtgaagctcgtgacaaaacccacctttaaggtgggacaaaacacgattcaccaagtggatgcgtccagtatttggaagtacctgggaatccagtttaggggtagtgggatgtgcggatgcggttcggagggtgtggctgctgggttgaagcggatcacttgtgctccgctgaagcctcagcagaggatgcacctgctgcgagtctttttcttgcccaagttttatcatgcttggacatttgggagactcaatgcgggtgtactgcgccgtctggacgttgtggtccgaacttcggttcggacctggctacgcctcccccacgatataccggtgggatactttcacgctcctacgaagtccggggggctggggatcccgcagttgtcacgattcatcccgttcttgcgattaaagcggttcgaccggttggggcgttccgcggttgactatgtccgagagtgtgcatttacggacattgcggatcgaaagatccgatggtgccgtgagcgcctctcgggcatagtggaccaagtcgcgggtgggcgggacgcgcttgatgcatattggacagcgcagcttcatcagtcggtggacggaagagcactaagggagtccgcttcggtggcttccagcacgcagtggctccgctgtagcacacgtgcaattccggcctctgactggctgcattacacggctgtccatattggcgccctaccatcgcgtgttcgcacatcgcgtgggaggcggggcggccaggatgtctcttgtcggggtggatgtcttctggacgaaactccggcacactgcatccaggtttgccaccgcacccacggggggcgggtgttgcgacacgacgccatcgccaagcgcatttctgccgacctgatggaacttggatggatcgtaacgagggaggtttccttccggacgactgcgggtgttttccggccggacatggtcgcggtaaaggagggtgttaccgtgatcttggacgtgcagattgtttcaccggccccgacactggatgaggcccatcggcgaaaggttgccaagtatcgggacagggctgacctggccaggtacttggctgaggctgcggttgctcgtgggcgtgcgccgcctgcgaatatacgatttgccagcgcgaccatctcttggcgaggcgtttggagtgctgagtcggtggggtccctgcgcgagctggggctctccgctcggcacttcgatcgctatacaacgatggcactctgcggttcatggagaaattgggtgcggttcaatgcgtccacggcctctcggatgggtcgtggacgcggcgacgcgagtcctcggaggcacgaaaatcagcagtgatgctcctttggttttaccatctgtgggggcatcggtcctcacggtttcctcgggtttcctattgtttttcctaaacccgacaaggagccctttggccctcctccttaaacacctctccttcatcctsttagtccattccggctaaaatgatgaagaccgaggagtgtcactctcttggcggggttaacccgtccaagtgtaaatgtgacctcgccattcgggctctgata

SEQ ID NO: 1104 - DNA, 3609 bp, Megachile rotundata
  source 1..3609: mol_type = unassigned DNA
tctagttagcaagcggccccctctaatcgggtcccgccacgagtaccttcggggaaaccaagagccgcctctgcgaacctacctccgcattgggttgccggcccggtgcggttgtaattcagtgggcccaaattcacaaggaaaagagaaaaagaattgtcggttggcccttagggcatctcggatcaccgacctcactgaaacttcgacacccgcgcctgcaagcgaagcgcatagttccagtgcttgcggagttgatgcaatgtttgtgtgctcgacatgtcagcggccgttcgccacaaaaatcggcttgggcgttcacgttagaagagcgcacgagtgcttgcggagttgatgcaatgtttgtgtgctcgacatgtcaaaggtcgttcgccacaaaaatcggcttgggcgttcacgttagaagagcgcacgtggaagtcgcaaacgctgccatatcagtggagcgcgttaaggatcgttggtcggaggaggagcgaagaataatggctgccgtcgaggttcgaggagtactctctggggctcgttttataaacgagtacattatgagtcatctccagaccagccggaccctcgaatctgtcaaaggaactcggaaaaaccccaaatacaaggaacttgtcgcaaccttactggaagaggcacgaaccagtgtgcgggaggagagtcctcgtagtgcggtcaacgatagcgccacccaaccatcaggcccctctgatacacgaagcctgcgcaccgaacacctgttcactgaaagcaccgagcctttcgaacatcggatccgagagttgatcggggatcttgagggagtgaccgacttcagagctgagttgctggtttccattgcggaacagcagcttcaaggcgatgaggtggcggaatccctgactcggtggcttggcgaggtttttaaacccgagaaccaacaacaacaggttcagcgtaagcgtcggcgacaaagaaaggcccctgtcagtgggcagctgccaaagtggcgcgagaggcgaagggattatgcagcgatgcagactctcttccatcggaaccccagtcttgctgctggtcgtgtgctggacggcaagaacgagtcccggcccccggatctgccagaaatgacagcgttttgggaaccgatactcaccgagcaatctgccgaacatcgggcagttgggccggcttccgagaaatcggagttgtgctcagtatggggtccagtagagaaagaagaacttctctcctccgtgccgccgttggacacggctgttggccctgacggtgtcaccgccagacaatggagagcggttttaccggccgttagagctctcttgtataacatcatcctcaagagaggctctttccccgcctcgatgctggaaagcagaaccgtgttcctgccgaagaagcaacatagtgtcaatcctgctgactttcgacccatcagcatagcgtcggtcgtcgtccgtcaattacacaagatcttggccatgcgccttcgccgtacgaacctcgttgacgaaaggcaacgatgcatggatgacggatgtgccgagaacatcacggtgttggcctcgctgctggacgatgcgaggcatggtctgaaggagctgcatctggtttcgttggattgtgctaaggcgttcgacagcgttagtcaccatgcgatcgacgcaacactaaaagaatgcggtctgcccgcgggatttgtgcaatacatctcccgcacatattccgacagttccaccaggctcgaggtcggaaggaatcggtcggagccaataaagaccaaccggggagtgcggcagggtgatcccctgtcaaccctcatcttctgtctgtgcttcgatagagtcgcgcgtaccctctcaccacacattgggtatgaccttaataacacccgcatcagtactctgctttacgctgatgatgctttccttgtctcgacgactgctccggggatgaacatcctgctccggagtgtggaggaaagtgccggtgaggtggggctttcttttaacacctcgaaatgctcagccctctccttaattccatctggaaaggaaaagaaaatgaaggtcggaacgactccgacgttcaaaacgtcgcagggttttattacccagataacgccctcgcaagagtggaggtatctaggagtcgacttccaatactccggaccgaaaaaagcaagtcggagtctcaaaatcgagctggaacgcatttcgaaggcccccctcaagccgcaacagcggcttttaatcctcagagtctacctgctgccgcgatattaccatcatctcgtactctccaggacaacccttggtcaccttaggggcctggacctgcaagtgcgcgcggctgttcgtaggtggctgtctctgccgcgcgacatccccattgcctacttccacacaacagcgaaggaagggggtctgggtcttccggcgtttgagacgtccattccatgcctgatgttagcccgcttgaggtcgatggaaacctcgacttgcaaggcggctagggcggcggttcaaggcttctgggtgcagaaacgcatccattgggctacggccgctctcactaagaacggagaagccctaacatgcaaggcggacgtcgatcggtggtgggccagtaggctccacaagtcagtggatggtcgcgaactgcgtgagtgctcaggcgttggctcgtccagcacctgggtaaattctgcgcttaacatcaccggcagagattacgtgcagtatcatcacgtccgcatcaattctctcccgactcgcattaggacatctcggggtgtgcgaagagaggggatggaggtcacgtgccgcgctgggtgtcaggtaactgagaccgcggcgcatgtcatccagtcttgccaccgcacacatggaggtcggattcttcgacacaatgccgtgtgcaaagtgctggcgtccggccttcgcgacaagggatgggaggtgcgtgaagagccaaaactgcgaacgcgacagggtctgaggaagccggacatagtggcgataaaggacggcgtcgcaagggtgatagacgcacaggtcgtgagtggatctggaccgcttgacgaggcgcatgagaccaagcgcaagtattattccgacaatggcgacgtaactgctgcgattgctcgtgagtgcaacattgctccatcgaatgttgcatactcgtcatgcactatctcttggaggggtgtgtggtcgcctcggtccgctgcagacctactacaggtgggtctgtccaaaaagctcttgggtttcatcaccctaagggtcttgagaggcagtcatctaaattggacacggtggaacaaaatgacaacgatgcgcgtacaccatcagcgaacaggtatcgggtaaatgtcgaaccgaattttgggtaacgtgcaccccaccatccttaatcggcagcacgcaataaagccgtgggcagtggttttagtgggtagtcattaggagtcccacagtacccagcgaacatcttagtgggtctgcgtaaacgcatttccactgcctatcctccgggaaaaaaaaaaaaaaaaaaaaaaaaaaaaaaaaaaaaaaaaaaaaa

SEQ ID NO: 1105 - DNA, 5002 bp, Apis mellifera
  source 1..5002: mol_type = unassigned DNA
tggtaatcaaatgcctcgctattttagtagcggtagcgctccgcccgcgcaggaaccattgacgccgccgtagtgtgggtgattttatatccaaccaatcacgtcaactacgatcatttgtaatcaccgacggtacttggtaggggtaccacatgggcattcttgctcattccacaacgccgcctccatcatggcaacaatttaaaatatatataaattcttaaggtttgaccgtattcatatatatatatatatatttaatattacaaccataaatcttatatcgagccttctatttggtctcaaaagcaatacgttgtcagatcttgtagaacatcaggagtgagcggtgcgctgtggtatccgtgctttgtgccgcggcgacaaaccaatacgctgctgcctgtcgcaaagcaatacgctgctgattctcggatgcgggtgtcgacggtcacgcaaagcgatacgctggtggggtttcaaaacaatacggcgctggtgctaaaaagcattatgccgctaacggctggattgtcgatcgccgctgcgggggctagtggcgcacccagagaggtgcgacgcgcaagcattggttctgtgcgaagcggagttcttgagagtaatggttgctgggggcacaaagcgcaacatatagcctcttatgcctcaagtcgtagttcgtacctccacgtggtcccgctggaatgcctatcgactcctccccggaggatcatagagttcgaaaccggctacggcgaggcaagggcggtgaggtgcacaccgatggggagcagcgaccccacctacccttagctaagagagcaggcgatccgccaactgtcagcacgaaataaactaatcatatgtatacgagggagaatttacaacgggtaccttgtgcccgaaccgcctgtaggtatcacctacaggtgttaaaatgaatctgatagctggcggatcgtcgaccctctttgatggctctgcgccaacgactggaaagaataggaacggaagtctaatggaaggaaagtgtcgggagcactataaattcccaaagaagaaaagaaaagaaaaaaaataaaaaacccaaattaaatgtcgagtaacgaagaaggagcctcggacacgggggcccccggccctggggtccccgtggcggacgtgtccgctgcggatggaagggccacttatgacgaccatggcatgtccacggactacgagaaacaaaccatcgaactgcccctgaacgggcagatacaatgcttatggtgccacattgaaggaaggaaccaaagattcctccaggaaagccaatacttaaaacacaaagacacgcaacaccctaaaggcgaaataatatggaggtgcgctgcatgccagaaagaattcgagaaactccatggctgcaggtgtcacttacccaagtgtaagggacgcaaagaagccaagggtgttgccaaatttaaatgcgactcctgcgaggaatcgttcctaacgcaaagaggattgtctatgcacgagctacatagacatccagcgattaggaacttgaaaagaacacaaggcaccagtcggggaaataccagaccaatcaacagagcctcggtctggtccaaagaggaaacggacctcttgataaaacttaacgagcgctacaaacacttaaaacagccgaacgtagcgctcaaagaatatttccccgacaagacactaaaacaaatcagcgacaaaagaaggctcttgcccgttcaggaacccgaagacgtggccacaactgatgaaacgggacctcctccttccgactcatcggaagagagcatatacgaatcggccacggaggacgaaggaggaggagatatgcaacaaacggctccaaacgatagctggaaggagccgtttatacaaagtataagaacaaaccacctcgaagaggaagactcccttcgaaaggtggaagaagccatcgaaagaatggctatgaatgaaggggtaactgaacaagaggtgggcacccttcttgaacaatttgtcgactccctaactcaatccccaacaacggaaagaaaggggagccgacgtaagagtcaaaagactacaaaaagaaagaccacccataacaatagaaaaaagttcttatatgccaaacaccaggagctctataaaaagagcccacgaaggcttctggagttggcgttatcgggtgagtctagcagtggcagagaagtggttaatctccctgaggccgactcagtgggtccactatataaaagtctatggggccaaataggcccggaaaaaactcacagaaaccaacctatgtgcaacaatatcgatatgagcgaaatttggactccaatcgccctggagagccttgtcgaaaaattcaaaaagataaagtccgacaccgcagccggcgcggaccagataaagaaattccacctgagaaagaaaggggcactacacgtattcgccaaactgtgtaacctcctcatgctgcaccgaatatacccagcacagtggaaaaccaaccgaaccacgcttattcccaaaccggggaagagcgcggaagaggttgagaactggagaccaatcaccatcgggtctctgctgggaagaatatattcggctatgatcgaccgtaaattacggtcgaaaataaagcagcacataagacagaaggggtttacacaggaggatggctgtaaaaataatatagccattctcagtagtgccttaaccaaaatgaaagaggactcaggtggaatcataaccataatagacatttccaaagccttcgacacggttccccacggcgaaataagccaaagtctgatgaacaaaggagtcccatcgcccatatgcgaatacattcaaaaaatgtacataggttgtaaaactattatatattgcagagacaagaaaacactgccagtggacatactgagaggagtcaaacagggagacccgctatcgccactgcttttcaacttgataatagatcccataatagggacactggacgagacgacggagggcattaaattagaaaacgagaacatttcagttctcgccttcgccgacgaccttgtccttttggcgaaagacaaagaaacagccgataagcaaaatcggctcatcaatgaatatctggacgacctgaaaatgaaagtatccgccgaaaaatgcacaaccttcgaaatcaaacggcagaacaaaacgtggttcctaggagacccacagttgacgttgggtcagcaacgtatcccgtatgccgacccagaagcagcaatcaaatacctaggaaccaacttcaatccatggagagggttgtgcaaaacctcgataaaagaaatcatcgatgcggctagaactgtcaaacagctgaaacttaagccgcatcaaaaaatcaaccttataagaacctacctcttgccaagatacatacataaattggtggcaaatcctccccctctggggactctagacctaatcgataaagagctcaaaactataataaaggaaatattgcacctccatccgtccaccacggacggactaatatacactgataagagccatggcggtctagggatccagcgggtggcgaacatagtcaagctggccaaactaaaacatagtatactaatgacaaggtcagaggataatgccgtcaagatagcacttaacgggcaagagggaatggtgaaaagatacgccacgtccataggcctacaatggccatgtggaatagaagaaatcgaggaaacgcgtaaaaaactcaagagggcggatacaaacaaatggaaaactttaatttcgcaaggacaaggcataaaagaatttttcggggataaaaccgggaatgcctggttatacaaccccgaaatgctgagaccgtctcgatacctggacgcactaaaactgagaacaaatacatatggcacaaaagcagcactccacagagcgaaaagagacatagacataaactgtcggagatgcggcgtccaggtggaaaccctaggacatatattgggactatgcacccatacaaagaacaaaagaataaaaagacacgacgaaatctgcgatcttatcgcaaagaatgtctctaaagaatacgtgatatttagggaaccagaagtagaggtaaacggtgacagacgtaaaccagatatggtcataaaagaccatgacaaggtatacgtcgtggacgtcaccgtaagatacgaaaacaatgattccctaaacaaggcctacaaagaaaaagaaaacaaatacaaagagacagcggaaattatgagaagagacttgaaagcaaaagagagcagagttctgccagtggttatcgggagcagaggggcagtgccccgagccactatagaaaatctaaaagtcctagggcttcaaacaaaacatgccctgacggcttcgctcatagccctccgatcgtcgatcgaaatggcaaatgaattcctggactacgatcacactacgtgatcgttaaaagtaaaaatctatttatttatttttattcctatattataacacattatttatttatttacttattgttttaaagatgacgaagccgcaaggccaatccaaatttaacaaaagaacgagactactggtcgacattaaaaagacgaagcagctgccagctgataaacaacagagcccgtctcggcctttacaccgagcggtgcaagtcctgacgtactattgtacgtctagggcgcggggcagattctaccgtgtagaatctggggcgacgcctccgcgaggcactccctggacaacgtacgctaaagcgtacggctaagtgcgcctcccgaaagggtccccgttcctaatttttccgagcccgcgggcagatctcgtggcagtgacgctagaaagttaagtccgcggacatataaaattacagccttaaataatgaaccccacgaaggaggtatcctcgaaattccgccacgatccttctgatcgtaggcgcaaaaca

SEQ ID NO: 1106 - DNA, 5188 bp, Nasonia vitripennis
  source 1..5188: mol_type = unassigned DNA
  misc_difference 896: note = a, c, t, g, unknown or other
  misc_difference 986: note = a, c, t, g, unknown or other
  misc_difference 1192: note = a, c, t, g, unknown or other
gactagactatgggttcagtcagtcccaaatagccgatcctggcgcgtccggcagtaatgccacgtatgagtcggttacccatctctaaacgcgtagaggtggggagctaaaggccaggcggtttacccgacgtcgaatttctccaggtctgtgtcagtcgacggaataaaggtactacaacatctactatctatcgggatcggaagacgccttacagcgttttccgatttttgctctttgagcatttttcttcaaattgcgataaccgacccgatcacgcggggctttgacaaagcaatgcgtggtcggtaagatggttgcaatcttttccacctcgtttcttttacggaacgaaagcaatgcgtgtggggaacgttaaaaactcccttcatgcatcccaggatttatcctgcttactgcaaagcaatgcgtgtggagcgactttaccacgagtcgctccaccgcaaagcaatgcgtatcgcgcaaaagcaatgcgtgtgggggacttgtcaaagatcccccgccgcaaagcaatgcgtgtcggcaccacgtagagcaaagcgtgtaggcagactttgtcaaaagtagttctgccgcaaagcaatgcgtgtggagatcttcgccggtgaaagcaatacgtgtgggcgaacttagaccttcgcgcccacacatcccatggtgaggagcggcccatgtcgaaagactaagcgccccggtagtgactaccgtgaaagtctaataatggacagcggaaataacgttgcctcggagccgaggggagctgtggatgtgacctcagcagctccaatcggggcggagttaaacgccgaaccttgcgaaggtcgcaaccaaaggagggaggctgccttaagtgctcaaacacgccggcgaaatncggcccgccgagctcggaatgcccaacaggctgacgagcccggcgatgatgaggaaatagagacacacgggcctctaactatccggacgncggagccgatggagattgtcgcaatagcgaaaaacccacaggcctgtcccaaatgcctgcagggaggtacccaacttctctgcatgggcagctgggaactaagcaggcacattaataaagaacatccgtcagtcgacgtgacctgggtgtgcggtgcttgtcaaaggcgctgcacaacgctcaggtcgtggagctgtcatgttctncactgtaaggggcgacaagaaccaaaggatctgccgttcaaatgtgagcattgcagcttgtcgtttgactcgcaaatcggactctctcagcacgagaggcatgtccatccagaggtgcgaaacgataagcgcgcggcagaggccaataagccaaagggcaagagtggccgtaggccttctatatggtccgacgaagacttgctgctcatccgggaattagagagcgaataccacggagctcgaaatatcaatgaaaaaatagctgaacatttcccggatagaacaggcagacaggtgtcggacgcccggaggcgtaaggattatgccgcgctccgagggagaggaggcccgcaaggcccagcagaaggagtcgaggccatcgaagaggtagacgaaggcgaaatccctgagggggaagagctggtcgccaccgatggcgctgcgttggaaagcggccccccggagaatggagggagcgcacccgcagaacaagtcaatgcgcccgcgctggaaagcagttctcagcaagatcgagagtgcagcccggcagtggggtccgatgaacaaatcgaggacagcagtgacgacgacgaattcagcgacgcattaggagaaatatcactcccagaacctctctcggttgaacgcacaacaatctcaccacctcctcgagatgactggaaaggcccaatgaggtgggagatttgcaatgcgagcgaagaagccggaagttacgcgaactgggtgactggactgcaggagctagtcaggaacaatgcgctgagtgaaataggactagactccctgtatgaccagctcatccagattatgcggcacccttccgatgacaacgaacaggatcgccttcaattgaacgctagaggccccccacgaaggggccaccgcaagaaccgacggcgccgtcgtctcacggccgctgatcgaaagcggtttgcctttgccaggtgccaagatctttggaacaacaacccaaagaagctagccgagttagtgattgccaatgacctgtccattctccaaaggcgccaagcgccaggtagaacggagacacagactctgtacaacgagctgtgggggagggtcggacctaatatcgaagcgccaaggcgcaccgaagacccgatacccgtatcgaggatcttcactccgatcactccccaagagataatgggcagaatcaggcgaatcaaaaacgactcggcagcgggtcctgacggggtaacgaaggacgacctgagaggaagaggagtcagcatagccctctccaagctgttcaactcgatcctgctagcgggttactacccaaaggcatggagagagaacagaacaacccttctgccgaagccagaaaaagatcctgctgacgttaagaactggcggcccattaccatcagctcaatggttagtcgagtctactcaggcttgcttgaccagcgagtgagggccgtcattaagcagtgtgatcggcagaaaggattcacggaggaaaatggctgtttcagcaacatacagttgttggatgacgccgtatcgaacgcaaagaaagcgggcggtgtcattactatcttggatgtttcgaaagcattcgacactgtcccgcatgccgtgatccaagggtgcttggagaaaaaaggaatccccgaaaccgtggccgcctatatctcgagcatgtatcgcgactgctccactgcaatccgaacgaggagcggggacgtaaagattggaatgaagagaggagtcaagcagggggatcccctgtcacctctcattttcaatctggttctcgaacctctattagaacgattgcaagagacaagtggagtggaaatcgaaggcatgaatctctcgtgcgcggctttcgcagacgacatagtatgttttgcgaatacagcccccgaggcgggaaggcagctacggatggtggcggattatctgggccgactcgatatgagtctttcagtgtcaaagtgtatagctgtagagtatgtcccccacaggaagacctggtacactaaaaacccaggcctcgaggtgaacggtaatgccgttccgagcatctcacctagtgagacgttcaagtacctcggggcaaaggtctctccctggaaggggctgctcgaaggcttcgaatctgacgcgttcagggaagtcatatcccgcgtccaaagactgccgttgaagcccatgcaaaaggtggaccttctacagatgtatatctttccgaggtacacctatgggttgataacatcgcctccggcgaaggcagtcttaaagactatcgaccggatcataagaacgagaatcaaggagatcctccacctgccagaatcggtaagtagcagttttctctacacgccgaggaagcagggtggattggggctccttgaagtggagaagatggtgctgatagccgctcttcggaacggcttgagagcccgtcaatcccacgatccggtcacacgcgcggccatgaactcgaacgcagccgacgatcggctaaaatcttacgccgatgctctaagactacactggccactaacaaccaaggagctagatacttataagtatcagcttcgcctgagctatgcccagaaatgggctgagcaaaaatggcaaggccagggggtcgaggagttcgcacaagatcccgtcggcaactcatggctgcagcgctatgatcttctgcccgcgtcaaggtacatcgatgctatcaagctacgaacaaacacgtacccgacgcgagcactaatgaagatcatagatggacgtgttgatagctcttgccgaaagtgccaaggcagtagcgagacccttggtcatatacttggcagatgccggtatactaaggataagcgaataagccggcacaatgaaatcaaagacctcctcaaggctcgtctagccaaaaaccatcaggttatggacgagccgcagataacggtccgaggccagaggtttaaacccgatctcgtcgtgaaaacgaatgagggaagggtgcacgtaatcgacgtaactgtccgctacgagcacagaacctatctggatgagggccgtactgagaaaattggcaaatatcgccaaattctcagcacgcttcggcgagatctgcactcgaacgccgaggaggtcattccaattgtaatcgggtcgagaggtgcaattccaagggaaacgcggaaagccctctcgaaactcggaattggcaagagtgattggcttacgatctcactaatagcgctgcgtagctcgctagagatcgtcaacgccttcatggatgactgacctgaacaaaacgtgttgtcttgtcttgtctaaaactatttattcgaaataaggggaggctaactgcctgcaagttgaacgcgaaagttagaccttcccacctaaagcccaaaagtgatcggggaatgaatccgcgggtgaccccagagttgggtaaacccttgaaacgttggagaagcggaagagagtcccgccaccgagcatcgagtgctgcggcgcccgaatgaaaccgatcgcggatggtgcaagtcgtaggacggggcacgacctaagcctctgtcacggcggcgaagccaggaatcaccatgcaaaggtgtgaactggggcggatacctccacggggtttccctgggcatcgcgcgagcgatggccaaagtccgctttctcagctacaaaacaaaaatggtatgagacttcgttaacactaatttttccgagcctagcaggctcccttgacaacgcttatgaatctggaaaaggacacaaagtggaaaaagcgctgatggtggacaaaagtcagttgagacttgatatcagttgttttgactaagaattttattatcgttgacttttaaatattttattattgactgttaatatactgacttgggaccaagtcatctctgttacccggtaccggttcctgtcatcaaaccggaaagtccgtcccacgtaatgtggtagacgcaggag

SEQ ID NO: 1107 - DNA, 3720 bp, Ciona intestinalis
  source 1..3720: mol_type = unassigned DNA
cgacggtgaaccaccttgtcgcggtgtaagagctttagtgtctcgaacaagaaatagcttgtgtgctgtccttctgggcggtgcacatacttcttaacctcccgaggccatgccggcgggggctttagcccccggcaggttttaccatgccggacgggttcgagaggtagaggccaaactaagagttcaccagcagacttcgcacgcggctggccactggccgaagtttaaacaacagggccgcatcttcccaaactcaatatatggtgttaagtgaaccgtgccgatgggtgaatggccatgggtaagttggtctctaacggtccttgtggagaagtggcgacccttcacaatacttcagccttaccctatgcccgggcaacttagggtggacgtatatctcccgcggaaaacatcttatctcatggataaaaatatatacgaaaacactacttctccaggagggggaccgctttgcggtgagaagacgcatcgttccgatgtgatcatccctccaccggggttcgccccgtcgacggacactgcttccaatacattaggggaaaatgtggatgcatctgcaaccactagcagtgccaacccattaagtcaggaaccaggatggtgcgaatcttgttccaagctgttcaaatcacaaagaggacttagagtccaccaaagatcaaaacatccagagttgtaccattctcagaatcaaccgcttccgcgatctaaagcacgatggagtgatgaggaaatggttatctttgctcgcgaagaaattgcaaataggaagatccgctttatcaatcagcacttacacaaagtgtttccacacagaacgctagagtcaattaaagggttgaggggaaaaaacgtaagatacgctcgcatcatggctgaccttgaggcggaaatgacctctcagcccgaagcagccacaagcttgtgcaccgaaacatcagaaaatctcgcttctagcaatgttctgccccaaacaagaggatgggctgaaaatctcgtcgaaaatattgacacagcacatctggcaaaccttgggccgttatcccagtttgaacctggtaaaccaagcagcagtacaaaagaggctatcaacaccgagtacaacgactggatcagcaaatggcttccctctggtgctgctcatagagaaagaagagcaaatccaccctcaactaagctaaatgctagagcaacaaggaggctacaatacagtaggatccagaatctctacaaattaaatcgttctgcctgcgcccaagaagtattaagcggggcttggaaggtccagtcgggcgaactgaacttgaaagaggtccaaccgttttgggaaaaaatgttccggaaagaatccgccaaggacaggcgcaagcccaagcccactggtgaagtactctggggactgatggagcctctaacaattgccgaggtgggatccactctgaagtcaacgacaccatcagccccaggacccgacaagttaacactagatggcgtaaagaggatacccattgctgaactagtatcccattacaacctatggttgtacgctggctaccaaccagagggactgcgcgaaggaataaccaccctaattccgaaaattaagggtacgcgtgacccggctaagctacgcccaattacagtgtctagctttatttgccgcatcttccaccgatgtttggcacaacgaatggaaacctctcttccattgggcgaaagacagaaagctttccgcaaggtcgatggcatctgtcataatatttggtccctaaggtctctaatacacaatagcaaagacaacttaaaagaactcaatataacatttttggacgtacgaaaagcatttgactccatctcgcataaatcactgggcatagctgcagcccgccttggacttcccccacccttgataacatacatctccaacctttacccaaactgttctaccaaattaaaagtaaacggaaaaatatcaaaaccaattgaagttcgtcgaggagtccgacaaggagacccactctccccgctactgtttaatgcagtaatggattgggccctatctgaactggacccaagagtgggagtacaaattggggaacaacgaataaaccatctagcattcgccgatgatattattttggtctcttcaacaaagatcggaatggtgtcctccatcaatacgttgagtcgccatctggcaaaatcaggcctcgaaattagcgctgggaaagaaggaaaatcagctagtatggccatcgttgttgatggaaagaaaaagatgtggacagtagatccccttcctaggttcaaagtaaacagccagaaaattccggcactgagtattacacaacagtataagtatctggggataaacatagatgcccaaggggcaagaaatgatgcagctcgaatccttacagagggtctagcagaattatctcgtgccccactgaagccacaacagcgactatatctgcttcgggtgcatcttcttccgaaactgcaacacggactggttttaagtagttgtgcaaaaagagcgctaacatacctggacaaaagtgtaaggtctgcaataagaagatggcttacacttccgaaggacacaccaacagccttttaccatgcgaaagcatgtgacggtggactaggcattacacgtttggaacacacaataccaatactcaaaagaaatagaatgatgaagttgacattgtcagaggatccagtgatcatggaacttgtaaaattgacatactttacaaatttactacacaaatactcaaatgtgaagctgcttaactcctggccagtaacagacaaagacagtctggcccgtgccgaagcctccatgcttcacacctctgtggatgggcgtggactaagcaattgcagtgatgtcccgcgccaaagtgactgggtcacaaatggcgcgtcgctacttagtggtcgtgactttattggagcaataaaagtgaggggcaacctcttgccaacaaaggttagtgcggcacgtggacggcaacgggagataacatgcgactgctgcagacgaccggagtcactgggccacatcctgcagacctgccctagaacatggggaccgagaatctccaggcatgactccctgttgaagcgagttcggaatcaggcatgcttaaaaaactggaccccgataatagagccatcgataccaaccaacataggacttcgtcggccagacctcgttttggccaaaggtaacatcgcctttcttgtagatgccaccgtggttgcagacaatgccaacatgcagttgcaacacgaagcaaaagtggaaaagtacaacaactcagatataaaggaatggataaaagtacactgcccaggggttgatgaagtgagggtaacgtcactaactgcgaactggcgcggttgcttgtatggaggttcagcatccttcctaacagaagacctgggactgcctaaagcagagttaagtctgctcagtgcaaagatcaatgaaaaaggatactacctttggtgtgctcactacaggggaacagcaaggttgtggaatcgaccgttaaggtcctgacagtaatatgaaaacatcacatctgaccggcacagaatcaccatgccgtaatgcacccaactaaggattccaatgggtaaaaaaaaaaaaaaaaaaaaaaaaaaaaaaaaaaaaaaaaa

SEQ ID NO: 1108 - DNA, 3646 bp, Nasonia giraulti
  source 1..3646: mol_type = unassigned DNA
cgggttcccccgacttcggcttgccgtggtctggggctcactgctttttgtggagtcatggttacatggtgaccctggttcctcgcacccccgctggaaactatctggggaggccatgattgggtaacgataaaggtcctggtcgtgtcctcctgagataggctgaatgggtcactaagtggcacctaatgggttaccagccctaggcggccgagatacgttggtccacagaaaaagaaagcctcggatggaaatgacggacgagccgctgctcgtgccgaaccaacgaatccgggcggaccagaccgcgctgacgacgacgaaggggatgttaaattctggtgtgaatttccaggttgtgatcgcttctttatgaccaggagcggtagaggcctccatcacaagaaaggccaccctgattggaatgatcagagaaacctggccggaaagcaacaccgaaaagagatatggtcggaggaagaacgtctcctgcttgccaaaaaagaggcggagcttgccatcagtggagctaggtttattaacgtagagttgcgtgattttacagcgcgctccctagacgctatcaagggccagcgaaagagacccgactataagatcttagtcgagaaatttgtcagggagttaagggttagaggcattcgtcaaggagtggcctcgcggagtcaacaagctcgcgcgatggcggtggcaggagctcctgcagcgacgtcctcgggggcaccacctgtcgcgactcaaccaccaccatcaggtcgcgtactaagatctcaggtcgttgaagcaccagcgatggagatccccgtggcagagtcggaaggtgactcctcgggggacgagctgtttgaggatgtcgagcccgtgcgattgtccgacctaccccctgacaggtttacgatatactttgctgggcttgaaatacccggcaccgaagatatatatgcccacaggctccataccatctgcctgatgacaacgtggcgaaccaaagaagaggtaagattagaacttggcctctttttgaaagatttgttcccgagtaagggcagtcaagaacgcccggagagaaccaacctgccggacccgagaaatcggatcgagaggcggaggggggagtacaaaaaatgccaggatctatggcgacgaaataagtcaacctgtgttcagcggatccttaaagaggatctttcgcagggtgaatgtttgcctcgagagctgatggagcccttttggaatgcgactttcacccagaatcctggcacggctccggtgctccctcctcccacggaggtttattctagtgtttgggagcccattcggcccgagaatatcaagggcaactatccgccgcagaacaccgcggcagggatagacggactgacagtgggtgacctgaaaggggtgtcgcgggagatgctggccagaatttttaacttattcatgtggtgcggcaaactgccagagcacctttgtgcctcacgcacaattctcctgcccaagaaacctggggcgaaagtccccggcgaattcaggcctatcaccgtgacatccgtcctcatccggacctttcacaaggttctggccgaaagactgaaggttgtccctcttgacccccgccaaagaggcttcagagagtccgatggatgtgcagagaacgtgatgctactggacatgaccatccggtaccaccacgagcggcgcagaaagatgttcttggccctgctagacatggctaaggcatttgactcggtctctttcgagtccatgcgggaggttttgactactaaaggcataccaacgccatttattgagtattttatgacgcacttggaggatagttttactgttcttcagcatggtaactggcaatcggggaaaatccacccaacatgtggtgtgaagcaaggcgatccactgtctccgcctatcttcaacttcatcatggatgaaatgttgaagaggttgcctaaggaaatcggggttaacttggacgggttatttgttaatgctatggcatttgcggatgacctgagccttgttgccaataccgaacaaggtctgcagatcctcatagatgaagctacttcctttctggggctctgtggactccgcgccaatcccaataagtgcgtcaccctagcaattaagaccatcccgaaggagaaaaagacggccattgacccctcatcacattttaggataggtaatgcggtgatcccctcgttgaagaggacagatgagtgggtgtacttagggatcaaatttaattcaaatggtcgccttatctctgacgcaaaacccaagctcataaaagatcttgagctactaactaaggcaccactcaaaccacagcaaagactgtgggcgcttaaggtgattgtcattccgggcatcctttacagaggtaccctggggagcagcaccgcaggctacctacgctctcttgactgtgtaataagggcctatgttcggcgatggctacgtctccctggagattgcccgaatgggtattttcatgcagcggttgcggatggagggctgggagttcaccccatacgatacaaggcgatggtagatcgccttgcccggctccgaaaattagagaaatccgcgtacatcacggggcctgaagccgcacgttatcttcaaagacaagtttctatcgccgaaaataggctccgagatggggccaaccgcattatgagtgatgcgagtatgctaagggagttccttcgggagcttctgtacaagtcctttgatggtcgtcccctggaaaattccagcaaagtaccaggtcagcaccgctgggtcgaggagccaacccgtttcctatccggggcggactatatgaattgtatacgtgcgaggatcgcagctcttccgactgcagccaggtgtgctaggggacgtctcaaagacaagcattgccgggcaggttgcggaaatgtggagacgcttaaccacgtcttgcaattctgccaccgtacccatggcactcgcattggacgccatgatgcggttgtaaagtatgttgtaggaggactcaagaagagggggtacgcagtgaaagaagagccgaaaatcgtcttacaggatgtggtgtacaaacctgatatggttgcgaccaaggaagggaaaacactcattctggacgctcaggttctaggcgaccagcgtgatatgagactggcacatgaagataagctccgtaagtatggggccccagaatttaaacgaaagatcaggagtgagacggggtcggcaaccattaagtccttgtcggttacattgagctggcgagggttgtggggacctgactcagtaaaggggctcctcgaagagggagtgattctaaagaaggaccttaagatcttgtccacaagagtacttataggagctttggcaggctggagaaggtttaatgaaaggacgagtatggcaacatctggaagaagagaagaggttacaacaaggatggtgagaaggtggaagagaagagagagggtcggtgttggttagcggactggactgtctggaggagtgtttaactcgggttctcatgggaacccgacaacgttgttatcttgtatgacaattcataaaaaaaaaaaaaaaaaaaaaaaaaaaa

SEQ ID NO: 1109 - DNA, 3549 bp, Lepidurus arcticus
  source 1..3549: mol_type = unassigned DNA
  misc_difference 2424: note = a, c, t, g, unknown or other
ggggtagcaattgatcgattcccgcttcctcgtggcgctaccctgggtaatactatgaggaattgatcacaccgtagcgaacgtcatcagtcacagctgcacgaatccagatagaaatataacagacgagtaattcttttaaaagctcgtcagtaatcttcccagatgtctggaaagagcagcaaaccgagaactgtatccagtggatccagttcccaagagactcctccaagtgggtccaacgcatgtgatatatgcgggaaatgcttcatgaaaccggtcggtttgtccagagtccatcctagtcaatatcatgcacgcttagaaaagaaccaacctaaagcgaagaagttcagatggactgatgaggatttgtattttttagcgaaaaaagaagcggaacttttacacttgggcagcattaaatttgtgaataaagaactggcagaattctttccggagaaatctgtcgaccaaatcagaggccaaagacgttctgagacgtacaaacagcaagttttatctatccattctgaactgctcaagttgcagactgtagccgattctcctcccccatcgagaatcccggcgaaagaagtctccgcttggcttgacttttttctggcccttcccaaaaccaagaataaatttagtgaagacaagttagaccaactcatccgtaccgctcaagatggtactctcatcctggatgatctagatttatatcttagagaagttctagttcaacccactagtcagggagagaaacaagcgaagttgctcccaccccccaaatccagtagagagaaaagagaccgcgaatatgcccgtgcccagaatttatatcggaagaataagaccgcttgtgtgaacgccatccttgatggtaacaagaagtgcgaaaataaaatacctgacattgacgatttctggaagaccatatttgagtcccattctcccccagatgcagaaccggtgtgttatgtcgttgacgaggagccgacaaatatttggagttggatttcattttttgagatgaatcataactaccccgattcgtctacctcacccggtcctgatggcgtgactgctcgcatgctccgttccatcccagcacgtgtcctaaataaattgttaaaccttttactctttattgaagacttacctgcagtgttcaagtgccatcgtaccgtgttgataccgaaaatcgacaatccgacatcaccaggcgaatttcgtcccatcacgatttcctccatagttgttcggcagctgaacaaaatcatcgctgctcgcgtctcagagggcgttcccataaatcctcgccagaaggccttccggcaaattgatggatgcgctgagaatgttttccttttggatttcattcttcgtgacgcaaaaacgaaaattaagtccctttcgttggctactgtcgacattaagaaagcatttgatagtgtgtcacatcattccatcttccgagcgattagaggagcgagatgccctgagaatctagtgaattatatccagaacagctactcgggttgtacgacccaaatttctgttggcggctctatatcagcatcaaaaatcccgatgaaccgtggtgtcaaacaaggggacccactatctcctgtcctctttaatttagtgataaacgaaattattcgcaaactgccggcctcgattggatacccaatcaatagtgagctttcgataaactgtattgcttatgcggatgacctgatactagttacaaatactagagagggcctgaagctactactcggcctattgaatgaagagctccctaagcgaggattagaattgaatgcatctaagtgtttcggcttatccttaacagcactcgggaaattgaagaagactcacctgtgtaccagtgaccaactcgatttacatgggactctaattaagaatcttaccgctgaggaatcctgggtttatttgggtgttcctttctcacacattgggcgctctaagagcttcagtccagatcttgaagctcttttaaataaactccagaaatcgccgcttaaactgcaacaaaagctttttgctttgcgagtttatctaattcctagactgctccacggtttagtcctatcaagagtggccattggcgaattaaaaataatggataagttaattttgaaacacttacgcgtatggcttcgtttaccgaaagatacccctttgggatttttctactcaccggtgaaattgggcggtttggggattaaaaacttacgtacaaacgttttgaagtgcaggaaacaacgcattgagcgaatgctagtctcccctgatgatgtggtgcgcttggttgcagagtcggagattttcctgaaagagacggacaagttaaaggacctacttactattaacggaatgtgcctagattancggaatgtgcctagaacgggaaaaaataacaagttttggagtgaaaggctatatacgtcatttgatggtaaaacacttgcctatagcgagtactttactcaaggcggcggctggatccgtgaagataagatccttcaacctgcccatgttttcgctgaatgcatcaagttacgtattaatgctttacccactaaatctagagttgcacatggccgtccaactaaagatcgttcctgtcgtgccggatgtcttgacgttcaaaaagtgccaactatcgaaacaatcaatcatatagcacaagtttgtcctcggacgcatggtgcaagaataaaaagacacgatcggctcgttcaattcctttctctcaaccttaggaaaaatccaaaaagaaatgttttagtggagtacaatttccgtacagtcgctggtatccgtaaaccggatatcattgttattgaagatacccgtgcagttatccttgacgtccaagttgttggtgattcgtccaatttggagatggaatacctggagaaatccaggaaatattctaatgacgctaactttatcaatgcgcttcaaaaactttatccaacggtcactaacctaacttttcatgcagttaccttcaacaatagaggcctgattgccaaatccacagtggcggccctccggatgctcggcgtcccacctagatgcataatgatcctttgtgtgattagccttgagaagaccctggaagtctggaggatgtttaaccaatcaactgcttccgctcggaaatgataatcgctccatcctgcaactaattatgaatgcaaatctgttaagtgacattagtgatacttacctgatacttaccctggtatttatttgacctatacttaccctggtatctacctgacatatatttatctaaccacctacctatgatgactcccgcggaaactctcacttaccttattacccacttggtcttttattttctcgttccttattactttgttcctttggtgtagggttctctggtttttggaacggcttccttagccggaattttgtctgatgtatcttgcttgtgtccttgaaatatacgacccaggcttgcgtcatttaggctctgggaaa

SEQ ID NO: 1110 - DNA, 3611 bp, Lepidurus couesii
  source 1..3611: mol_type = unassigned DNA
tttggggtagcaattgatcgattcccgcctcctcgtggcgctaccccgggatagcctcaaagaaatttgacggtaaagcaaagaggaattgatcacccaaggcagtacatcggccttcctgcaggagctctgataaagatattagtgagttattctgttgaagctcgctatttcattcccctgatgtcagaggaaagcagaccaaagcagacggcctccaagcgtggagccgccgtggagaagactatgatgagtgggacctacgtgtgtactttatgtggtaggagttttgagaagtcggtgggtttgtcactccacacgaaccggatgcaccctgaagcttacaataagctgaaggaggctaagaaacctgttttgaagaaggcgcgatggtcagaggaggaggttttccttctagcgcagaaggaagcggagctctcattcattggaggaattaagttcatgaacatcgagctgcataaaatttttccagagcgtgagttggagggaatcaaaggccaaagaaagaacccaacgtacaaagcgcaagtcgttagcttattagctgagatccgagagtctaaggccaatgattcctcttcatcttcctcatcctcctcctcttgtgattcggcctctttgggcattagcaattggcttgaatttctgctagctctcccgaagacctccaaccaattccaggaaggtaggctagataggctaatctctgatgccctgcggggtgttgatgtgctagaaaaccttgatgcttaccttctcgaggttttcgctaagcccatggcgcaaaatccttgtccaaagcccccaccccctgcgaagaacagtcgtgagagaagggatagagaatactctagagttcagaatttttataagaagaaccgttcagcgtgcattaattccattttagacgggaacacccggtctcaaaatgtgatacctggcttgacgaagttttggaccgagacgtttgagaagaactcgccacctgatgatgaagcccctgaccagttcgttgcggacgagcctagagacatgtataagtggataactttttatgagatgtctcaagattatcttgattcttccactgctcctggagtggatggtttctctgccaaacagctccggtccatgtctcccagggtgctaaataagatattgaaccttttacttcttagtgagaacttacctaattcgtttaagatgcataagacagttcttataccgaagattgatgatccaaagagtcctggggattttagaccgatcacgatttcccctgtccttgctcgcctccttaacaagattctcgctgctagattgagcaaactagtccccattagtcagcgtcaaaaggcttttttgcctgttgatggctgtggggagaatattttccttttggattatattcttcgtagctctaagaaaagtagtaaatcagtggcgatggcagttttggatgttaaaaaggcatttgatagtgtatcgcatcactccatccttagagcccttaatgaggccaagtgtcctattaactttattaacttcgtcaggaatagttatgatggatgcactaccaaacttacttgtgggggtacttcctttccggactcggtacgcatgaaccgaggagtgaaacagggagatcccctatcgcctgtgctctttaatttgatcattgatagtgcaattaggaagttacctgactctatcggctatgtgataagggatggcttaaagattaattgcctggcatacgctgatgacctgattttggtagcttcaagtcgtgctggccttaagaccttactgaatattgttgctgagcatctctcgctacgcgggttggatttgaatgctgctaaatgtcatggtctgtcaattatcgccagtggtaaggccaaaactacttacgttagtgctgcggattccctagatcttgacggtcaacctataaagaatttgggagtgctggacacgtggacctacctcgggattccattttcccatctgggtcgagctgagaaagtttctcctgatttgaccaacttacttaacaaacttcagaaagctcccctcaaactccagcagaagttatatgctgtacgtaactttgttatccctagagcactccatggcctcattctatcgaagacaaacctaaaagaattaaacacgcttgatagagcaattagagtttttctacgtaccttgctttacttacctaaagatacgccactgggatttttccattcccctatcaagtccggaggacttgggattacgtgttttagaacatctgtccttaagtgccggctacagagaatagcccgaatgcgtagttcctgtgatggagttatacaggcagtggcggaatctgatatcttcgctgatgaatatgccaagttgcgggaccttattaggataaacggcaatgtgctcgacacgaccgagagtattaagaggtattgggctcaacgtcttcactcttcggtagatggcaagactttggcctacatggattatttccctcagggtaatctttggatgtcagaggataaagtgagccagcgatcttacgtctttgctgactgtgtcaagttacggattaatgccatcccaactcgtgtccgtgtttctcgtggtcgacctaataaggaaatgtgctgtagagcgaaatgttttgattcccagagaatgccagcgtttgaatccttgaaccacataacgcaagtgtgtccgcgcactcatggctcgcgaatccagcggcatgataagatagccaagttcctttttaagaacctgaacaattgcccatctcgctcggttctgtatgaaccccattttgtgacggtcgatggcctgcggaagcctgacattatcatttacgatgatagccacatggtggttctcgatgtccaggtggtttccgactctgctaacctggagaaggaatttgagtgcaaggcgaagaaatatgccaatgatgttgcacttcgatctgcaatgctaattaaatacccattcattaagtcattttctttcgttgcagctacctacaacaaccgtggtctgatagctaaatcctctgtccaggtccttcgccagctgggtctctcgccgcgctccataatggtctccatcctcatctgccttgagggtactttggaaacatggcgcatcttcaatcagtctacaatgaatgcccattagtgcttgagtgatgcctatcctttctttgattaactcttaccatatacttaccagttcttacccgtacttaccctgtatacttacctgtgtgcgtacctgtgtacttgtcctttagccgccttgtgtttttaccattggtacttaccttgtgtggttgcccgatacttaccttgtatttgccttgtaattctgcatgatatttattgtgtaggttcctgatgcttacctgatttgtccccctcatcatctttagtttcgttctatttcactccattatggagttccgtttgttttttggtggaggtacagcaccctttaagctggaattgagtgagtttatgtactttggatggttgtaataaactacccggaggcat

SEQ ID NO: 1111 - DNA, 3597 bp, Lepidurus couesii
  source 1..3597: mol_type = unassigned DNA
  misc_difference 2463: note = a, c, t, g, unknown or other
ttttggggtagcaattgatcgattcccgcctcctcgtggcgctaccctgggataacctcaaagaaatttgacggtaaagctaagaggaattgatcacaccgtgacgaatatcatcagtcacagctgcacgaatccagatagatatataacaggcgagtaattcttttcgaagctcgtcagtaatcttcccagatgtctggaaagagcagcaaaccgagaactgtatccagcggatccagttcccaagagactcctccaagtgggtccaacgcatgtgatatatgcgggaagtgcttcatgaaaccagttggtttatcactacacatgtccaaagtccatcctactcagtaccatgcacgcttggaaaagaatcaaccgaaagccaagaaatttagatggacggatgaagatttgtattttttagcgaagaaggaagctgaacttttacttttgggtggcattaagttcatgaacaaggaactggcagaattctttccggagaaatctgttgaccaaatcaaaggccaaagacgttccgagacatacaaacagcaagttgtatcaattcattctgaactgcttaagttgcaggctgtagctgattctcctccaccatcgagaattccagcgaaagaagtctcggcctggcttgatttccttctggcccttcccaaaaccaagaataaatttagtgaggacaagttagaccaacttatacgtaccgcgcaagaaggcactccggtcctaaacgatctagatttatatctaagagaagttctagttcagcccacaagacagggagagagacaggcgaagcctctcccaccacccaaatccagtcgagagaaaagagacagagaatatgctcgtgtccagaatttttatcgcaagaataaaaccgcatgtgtgaacgccatccttgatggaaataagaagtgcgaaaacaaaatacctgacattgacgaattctggaaggccatatttgaatctcaatctcctcctgatgcagaaccagtgagttacgttgtagacgaggaaccgaagaatatttggagttggatttcgttcttcgaaatgaatcgtaactaccctgatacgtcgacctcacccggtccagacggcgtgacggctcgtatgctccgttccatccctgcgcgtgtcctaaataaattgttaaacctattactctttattgaagacttacctgcagtgttcaagtgccatcgtaccgttctgatacctaaagttgacaatccagcattaccgggagaatttcggcctatcacgatttcttccataattgttcggcagctgaataaaatcatcgctgctcgcgtctcagagggcgttcccataaatcctcgtcagaaggcctttcggcaaatagatggatgtgctgagaatgttttccttttagatttcattcttcgtgacgcaaaaacgaaaattaagtccctttcgttggctactgtcgacattaagaaagcatttgacagtgtgtcacatcattccattttccgagcgattagaggagcgagatgccctgagaatttggtgaattatatccagaacagctattcgggttgtacgacccaaatttccgtaggcggctctatatctacaacaaaaatcctgatgaaccgtggtgtaaaacaaggggacccactatctcctgtcctctttaacttagtgataaacgaaattattcgcaagctgccggcctcgattggatatccaatcaatagtgagctctcgataaactgtattgcctatgcggatgacctgatactagttgcaaatactagagagggtctgaagctactactcaacctattgaatgaagagctccctaagcgaggattagaattgaatgcatctaagtgtttcggcttatccttaacagcactcgggaaattgaagaagactcacctgtgtaccagtgaccaactcgatttacatgggactctaattaagaatcttaccgctgaggaatcctgggtttatttgggtgttcctttctcacacattgggcgctctaagagcttcagtccagatcttgaagctcttttaaataaactccagaaatcgccgcttaaactgcaacaaaagctttttgctttgcgagtttatctaattcctagactgctccacggtttagtcctatcaagagtggccattggcgaattaaaaataatggataagttaattttgaaacacttacgcgtatggcttcgtttaccgaaagatacccctttgggatttttctactcaccggtgaaattgggcggtttggggattaaaaacttacgtacaaacgttttgaagtgcaggaaacaacgcattgagcgaatgctagtctcccctgatgatgtggtgcgcttggttgcagagtcggagattttcctgaaagagacggacaagttaaaggacctacttactattaacggaatgtgcctagattancggaatgtgcctagaacgggaaaaaataacaagttttggagtgaaaggctatatacgtcatttgatggtaaaacacttgcctatagcgagtactttactcaaggcggcggctggatccgtgaagataagatccttcaacctgcccatgttttcgctgaatgcatcaagttacgtattaatgctttacccactaaatctagagttgcacatggccgtccaactaaagatcgttcctgtcgtgccggatgtcttgacgttcaaaaagtgccagctatcgaaacaatcaatcatatagcacaagtttgtcctcggacgcatggtgcaagaataaaaagacacgatcggctcgttcaattcctttctctcaaccttaggaaaaatccaaaaagaaatgttttagtggagtacaatttccgtacagtcgctggtatccgtaaaccggatatcattgttattgaagatacccgtgcagctatccttgacgtccaagttgttggtgattcgtccaatttggagatggaatacctggagaaatccaggaaatattctaatgacgctactttatcaatgcgtatcaatgcgcttcaaaaactttatccaacggtcactagcctaacttttcatgcagttaccttcaacaatagaggcctgattgccaaatccacagtggcggccctccggatgctcggcgtcccacctagatgcataatgatcctttgtgtgattagccttgagaagaccctggaagtctggaggatgtttaaccaatcaactgcttccgctcggaaatgataatcgctccatcctgcaactaattatgaatgcaaatctgttaagtgacattagtgatacttacctgatacttaccctggtatttatttgacctatacttaccctggtatctacctgacatatatttatctaaccacctacctatgatgactcccgcggaaactctcacttaccttattacccacttggtcttttattttctcgttccttattactttgttcctttggtgtagggttctctggtttttggaacggcttccttagccggaattttgtctgatgtatcttgcttgtgtccttgaaatatacgacccaggcttgcgtcatttaggctctgggaaa

SEQ ID NO: 1112 - DNA, 3922 bp, Nematostella vectensis
  source 1..3922: mol_type = unassigned DNA
ggttggggccttctcgtggcggagtcgtgagtaaggggtataggggtaagggacaccacggaccgagaacggttaccgctcaaggcgagtggtggaaggcataaaatcgtaacgccgccctccgacctgctcctgaaactaatgccaaccaactgactgtggggctaacctccccagagtcaggatgctgaggggtactgggaatatgaatgacaagagggacggatcggccactgctgatcctacctcagcgcttttgggggctgtcggtgatggcagcctggtatgcaatctgtgtggccttgcttgcaagtctcgtggggggctctcgattcatcgaaggagcaagcatgccacggtgtaccatgcggaaaggcagcccgctccgcgggctaaggcgagatggacgaatgatgaaatgatacttgtggccagaaaacaaatagcttcggaaaagagtaggtgtagcgcagtagttgaagggatgcgagaagcagttccacatagaacttttgacgccgtcaaaagtctcaaaaccaagaataggaactacacacggattctggagcagattcgcgctgaatgctccgaggaagaggtgattgaatcaggagtccttaaggataggacggagaacgtgtgtgtgcaaacaacatctaacgttcccggttcggcaggacgggcagcatcggtggagctagagggtaatatccaggtgggccatcaactcgcccaaaaaaccatggcaggcaataatagtaggaaacagcctgccaatcataccaactgggctgagttcaatattgaggagggaaatattaccctccgaaaaagcaaaagaaaggctaatggtatgcccgatgcgacccaccgccccggcccaccgactgtcgacagtcttaagcacccagtatgcttgttgcagggtgcagccgacaaaagggacgaaccgcacacagtggaacaattgtattataacattgaggaaggaatgcctcttgccgaagagcaacagtggtcagaaaagcttttcgatgcaatcgactcatctttgttgtctgtcgaggtcgagctggggagaatcgttcctggttgccccgacgaagagacccgacagctcattgatagagaattcttggattttatccattcctattcgagggaaaagccgccacaaagaggtctcgctaagtccaaaccaccacccaaaggaccaaagagcctcagacgccagcaatatcggcaactccagagattgtgggacaaaaaccgatccgcagcagccgaacaggccctaacaggtaaatggcaagaagttcggactgctgctggggtcccattatcgttgatggaggtcccgtggcgggagattttcgaaacaccatctacgacggacgtccgagagccggccccagctgggccggttctgtggcagcttctcagaccagtgactatcgcagaagtagaggacgcaatttcctccaagaaatcagctagcggtccagatggagtgccttgtgccgcccttcaaaccatgggcgccgcctccctagcagctcactttaacttgtggctgttggccggtactcagcccaaacgcctaacagaatgccgaacaatatttgtgcctaaggaggtaaatactcacctgcccctccatcataggccaatcactatcggctcggtggttgtaagactcttccaccagattctgggaaagccaatggaagcagtactgccattggggtcgggccagcgcggttttcgaaagggtgacggaatatgccagaacatctggctcctccatactctaatcagacgcagcactgatttgctgaggccactcaagctggtcttcttggatgtgaaaaaggccttcgattcggttagtcacgaatcccttttaattgcggcgaagcgtctcggagtgcccgggccgctcctaacgtacatcaatgaactgtactctcgttcggagacagtctttgaagttgggggcgagagcagtggctctgttaaagtatcccaaggggtaaagcaaggggatccattgagttcgacgctcttcaactgcgtcattgactgggcggtctcagatctcgacccccacataggcgtcttactaggggagtctcgagtctcctttctagcttacgctgatgacctggttctcctatcggagaccgaggctgcactgacaagccagctgaactcaattgaaaagagtctagcgcactgtggtctcaagctcagtacgggggacagtggtaaatctgcttcgctgaacatcgtgattgatggtaaagctaagcggtgggttgtaaaccctaccccgttcctacgtgcgtctggtggcgaaattcgatctctcgtcgcaaatgagacgtacaagtacttgggcattaacatcggagcccagggcgtgaaagctgctgaatacaatgcattcaaagaagcactcgataacttgtctcgagctccacttaagccgcagcagaggttattcctgctgaagacctatctgttgccgcaactacaccactcactggtattgtcaaggacaactggcaaactattgaacagcctcgatgctctcgtaagaaaagctgtacggggatggcttaaattgccacacgacactcatagggccttcttttatgctcaccaggccgacgggggactcaatgtcccaagtctgtaccatctaatacctctcctaaggaggagtaggtatgaacgcttgacgagggtcgaagaccctgagataagggaagtgtcccgaaccgactacttcaaaagagtcttgggtgccgcggcggcggccaccacggttgcagggcatcgaattgattccaaagtaacgttgcgcctagcttggcgcgaggccctttacgcttcagctgacgggcggggtctctcccaatgcccgttggtacccgaggttcactcctgggttaccgatgtttccggtcttcagaccggatcgcagtacatctctgctgttcgcttaaggggggccttgcttcccacggcggtaaggaaatcgaggggtcgcgggggtgttaactcgaattgcgactgttgcggtcgtggacaaccagagtttcttgggcacgttctccagacgtgtcctcggacctgggggtctcgcatcagtcgtcacaaccacgtcctctcccttatcgctaaagcgtgccgttcgcgaagatggcaggtgctggaagagccgatcatccagactcctgcgcagttgctcaagccagacttggtgatctggaaccatcaagcggcgtacgtcgttgacgttagcgtaccgggtgataacaccccgctcagtacgtgtcacaacaggaaagtcgcatattactctggtgagagcgttcgtgaatgggtgcgttccaagactgggcataatcctacagtgtcctctgtagtgattaactggcgcggtgccatggcaaaggagtcctaccgccttttgacgaaagaccttcgtctagcgaagaccctgcctcgtctgctggtactaagagttctggaaggcggccatggaatctggctcaatttccatcggtcgaccttcgccgtgggagtaacttgatggtgggttactcgcctctgtgtaacaggcaaatgaaagctgcgcaagcagtcgatgagccaaagccgcacagcccccgactggggtacagggcagccctgggctatgcccgaagtcttttgacaggtccaaacttcacccttgccgccagtagggcaccagggccaggtgcaggtgggcgctttgttctatttggtttcgcttaatttttgttaaatttttcccgtgcgcccaccctttttaacccttttaacaccaattttttttacaaccctctactcaataatccaaatgaataaaagcggcataacaggtgaacac

SEQ ID NO: 1113 - DNA, 4317 bp, Schistosoma mansoni
  source 1..4317: mol_type = unassigned DNA
atgttttaatttatttttgaactactactgtctgagtgcttcttacaacctgaaggctcagaaactacccactttttgctgtttatccacaacaacagttgtgaatctattctccaaatattccttgtgcttttgtcaacattattctataccaactgtaccacctacttcttcatctcacgttttaattctggtctaattttctcatcattagtcacggagagggcctatgaacggtccgtgacgcgaaattcaatccacgaattcgtcctcttctgctagtggtccccgaaatacggttcctctggcctgtcagttgtgttaaaactatataataacgatgccggtctcaaccggcgcagaaactgacataacctcttctttgcctattcctgcatcctcaatcgtctcgccaaactacacactccctgattcctcttcaacctgccttatatgtttcgctatcttccccacccacaacatactcctctcccatgccactgcaatccaccatatttcttgtcctcctactccagtgcaagacggttctcagcagatgtcttgtgttctttgcgccgccgctttttcatctaacaggggactaacacaacacattcgccaccggcacatctccgaatataacgaactaatcagacaacgaattgcagtgcagccgacgtctcgcatatggtcaccattcgatgatgcttctctactatcaatcgctaaccatgaagcccatagattccccacgaagaatgacttataccaacacatcagcactgtattaacacgcaggacggcagaggccgtcaaacgccgactcctccacctacagtggtccagatcacccacagcgattactacctcttcgaataatcacacaaccacagacatccccaataccgaggcccgatatatttttccggtagacctagacgaacatccaccattgtctgatgccacaacccccgacgcatcgacacatccactcccagaactccttgtcatcttgacaccgcttccatccccgactagactacaaaacatatccgaatcacagacctcccatgaatccaataggaactcaatgcatacaccgccaacgtatgcctgcgattcggatgagtcactaggggttactccctcatcaactatcccctcatgcttccacagttatcgggaccccctagctgaacaaagaagcaaactcctgagggcatccgccagcctactacaaagcagttgtactcgcatacggtcctccagcctgctcgccttcctccaaaacgcatccacattaatggacgaggaacacgtgtccaccttcctcaatagtcatggagaattcgtcttccctagaacatggaccccatcccgacccaaacacccctcccacgccccagctaatgtttctaggaagaaaaggaggaaaatagagtacgcacacatccagacactcttccaccaccgtcccaaagatgccgccaacaccgttctagacggtcggtggagaaacccctatgtcgcaaaccattcaatgattccagacttcgactgcttctggacaacagtctttactaaaacaaattccccagacagccgggagattactccaatcatccctatgactccctctctcattgacccgatcctcccctctgacgtcacatgggcgctgaaagaaatgcatggcacggccggtgggattgatcgtctaacatcgtacgatctgatgagattcgggaagaatggtcttgctggatatctcaacatgctactcgctcttgcataccttcccactaatctctcaacagcacgggtaactttcgtccccaagtcatcaagtcctgtgtcacctgaggacttccgtcccatcagtgtcgctccagtagccactaggtgcctgcacaaaattctagcaaagagatggatgccgctctttccacaggaacgacttcagttcgctttcctaaaccgagatggatgctttgaagcagttaatcttctgcactcggtcatacggcacgtccacacccgccatgcaggagcatccttcgccctgctcgacatatcacgggcctttgacactgtatcacatgactccatcatcagagcggcgaaaagatatggggcacctgaactgttatgccgctacctcaataactattaccgacgttcaaccagctgcgtcaaccgcactgaattgcatcctacgtgtggggtgaagcaaggagaccccctgtcgccactcctcttcatcatggttctcgacgaattactggaaggtctagatccaatgacccacctaacagttgatggagagagcttgaactacatagcttatgctgacgatctcgtagttttcgctccaaatgcagaactccttcaacggaaactcgatcggatctccctacttctacacgaggctggatggtcgattaaccctgaaaaaagccggaccctggacctaatctctggtggccattccaaaatcacagcgctctctcagacagaattcaccatcgcggggatgcgtataccaccgctttccgccgccgacaccttcgactatctgggtatcaaatccaacttcaagggccgatgcccagtggcccatattgacttattgaacaactacctcacggaaatatcgtgcgctccacttaagccgcagcagcgcatgaagatcttgaaagataatctactccctcgactcctctaccccctgactctaggaatagtacacctgaaaaccctgaagtcaatggaccgaaatatccacacggccataaggaaatggttgcggctaccctccgacaccccgctagcatattttcactcacccgtcgctgccggaggcctagggatcctccatctgtcctcatcggttccattccaccgtcgaaaacgtctagaaaccctcctatcttcaccgaaccgcctactgcacaagttgccaacttccccaacactagcttcttattcacaccttagtcaactgccagttcgaattgggcacgagaccgtaacgtctagagaagaggcttccaacagctgggtgagacgattacattcgtcctgcgacgggaagggactactcctagcaccactaagcaccgagtcccatgcatggctgcgctacccccagtctatttttccaagtgtttacatcaacgccgttaaattacgaggtggcttactatccaccaaagtcaggagatctcgcggaggtagagtgacgaatggcctgaactgtcgaggcggttgcgcccatcatgaaacaatccaccacattctgcaacattgcgcgctcacccatgacatcagatgcaaacgccataacgaactatgcaaccttgtggcaaagaaactgcgtaggcaaaaaatccatttcttacaggagccctgcattcctctagaaaaaacttactgcaaacctgattttataattatacgtgattcaattgcttatgttctagacgtcactgtatcggacgacggaaacacccacgccagccgcctgttaaaaatatcaaaatacggcaatgagcgaaccgtcgcatcgatcaagcgattcctcacatccagtggatatatcattaccagtgttcgacaaacaccagtccttacattcagaggtattctggagagagcaagttcacaatccctacgacgcctatgtttttcgtcccgtgacctcggtgacctttgcctgagtgcgattcaaggctcaattaaaatatataatacctatatgagaggaacccaacggctgaacgaatagcccccttcactcttagacattcccccactgttgttgcttatcttcatgtttttgtgttaattgactgctctcttctgggttgatgtctgattgtctctctctctttccatattgcttgctctccccgcttacttccaatagttgtcatattatgtctttgtttacttgccatgtctaacgacaattactttatctaccttagttggtcctcttggtttggttgccttcatgtgttcatggcggaatctgatgtttataatgactattcctactaccaccattacaactattattattatcactattattaacattattattacttctacaattagtattatggctactcctttcagcacaccaataaaatctcaatcaaacatctcacttattaaactctctatttccccttcgttataaacttacaattcagtttaaccgaatatctctcttttacaaatcttaagtatgtaattttgtgccaagcccatttgggtctgtacaatttgatacttaaaaataaatgttat

SEQ ID NO: 1114 - DNA, 3583 bp, Triops cancriformis
  source 1..3583: mol_type = unassigned DNA
tttttggtctggcatttgatcgtttccgcctcctcgtggcgccagactgggtaagctgatttatcagtgagctaagagaaacgatcaccgcaggagtccatctacctgcgctgcacgtgatttcattgtgcacttggcgagttatcccttgtggagctcgctcgttagcttttgagatgtctcaaaagcgcagaccggagaaagcagtccccgacgagggagcgactgctcatgatgttgcgcaaccggataagagtaagtgttctgtttgtggggagacttttaagggtcctgcttccgtgacaatgcacatggtaaagaagcacccagtcgaatttaatgagcttaagatggccaagaagcctgttccgaagaaagtacgatggtctgaggaggagatcttccaacttgccaggacagaggccgaacttacccttcagggagttcggtttattaatgtcgagctgcagaagatcttcccagcacgcgagatcgagggcatcaaaggccagaggaaactggctaagtacaaagagctcgttaaagatcagctggacgaaatcggccgtgctcctaacccccctgagcaagagatcggagaggatgtgcctagcccgttcaaggcatggctggaacttctgcttgcgctccccaagacccccaatgattttctagaacacaaacttgacaacattattgttcaagcgctgaaggaagacgtgaactccgatcaggtattcaatgaccttaactcctatttaaagctgattcttgagccgagtggtagagccaagtcagttcccggggaaattatacacggtgatcccagtgggtctgctaagacctcagtaaccaaggctcctaagcctgctacagtttcttctagcaggaaaaaacgcagagatgccgagtttgctaggatccagcgtctctatcggaaaaatcggacatcatgtataaatacaatccttgatggcaatacaagagagcatgaggcccctaagaacatggaaggattttggagggaaatattcgagagggaatccccggatgaccccgatgatcccgacattttccttgaggaagaagccagtgatatttggaagtacatctctttctatgagatgtgcaacctttatccgcctccctccactgctcctggccccgatgggttttcctctaaggacctccggcggatgacgccaagagtcctcaacaaaattttaaacctactccttcatttgagagatcttcctcagatcctgaaatcccatcgaactgtactaataccaaaaaccgatttgcctactaaacccggggactttcgtcccataacgatctcaaatatactagtcagacatcttaataagattctggctaatagagtgagccaccttataccaatcaatgagaggcagaaagctttcctaccaattgatggctgcgcagaaaatattttcactttggacttcatactccatcatgcgcggaccaaaattaaatcgctgtcaatggccattctagatattagtaaggcatttgatagcgtctcgcatcattccatcttccgcgctttgcgagaggctcgatgccccattggttttattaaattcattgagaattgttatggtggatgttttaccaaacttttctgtggtggcgtgaaatacccgagtgaggtttctatgaaccgaggagtaaagcagggggatccgctgtcaccagtcctatttaacttagtcattgatggtctgatcaggcaaattccatccgctcttggattcaacgtaagtgatcaggtgaaagtcagctgtatcgcctacgctgatgacctgatccttattgcgaccacaagggctggcctgaagaccctgcttgacttgactaactcctacctagcaaaacggggactttcgctcaacccggacaaatgctcggccctatcgattgtggcatccggcaagcagaagcttgtatatattgcgtcttccgagcattttgatctcgcaggtcagaaaatgcgcaatttaaacgtcggtgactcttggagatacctgggtattcaattctcgcatctcggtagagccgaaaaggtcactccagacctaacatgtctaattaatagacttcaaaaggcccctttaaagcttcaacagaagctttatgctctccgaatctatcttatacccaggcttatccatggcctcaccctctctaagaccaacctcggagagcttaaaacgctggacaagctaatccgcaagtacatccgcgcctggctccatctcccagatgacactccgatgggctatttctatacccccttaaaagctggtggacttggccttccttcactccgtctagtgatccttaacaatcgacttgaacggatactaaggatgaaggcttctcaagacattattgtccgcactattgccgaatcggagacgttgggggtcgagattcgaaagcttcacgatctgttgtccattgatggaacaattctggacacgagcgttaagatccatagcttctgggcagaaagactctactcgtcctatgatggtaaatgtctttgcaattctgcaaattttccccccggaaacaagtggatcggtgaagattctctgaaccaacgctcgcatatcttcgctgattgcctaaagctccggataaatgcgctcccaacacgttccagaacagcacgtggaaggccactaaaagataaaccatgtagagctggatgtcggaacagtgatggtgtaaaggtcattgagacactgaatcacattacacaggtgtgtgagagaacccacggagcccgcgtcaagcggcatgatcgcctagtggacttcgcggtgaaaggactacaaagaccccatcgtgtggttctaaaggagccacattacaagacagtaaacggtgttcggaaaccggacatcgtcattaaaatccccgaccacacatacatttgtgatttccaagttgtatctgatacctcttgtttagagttggagttccggaagaaagccctcaagtatgcggaggacaaaggcctctgcgatcaacttacccgcgaccatcctggggagctctcattcaccgcaattactttcaatacaagagggcttatagccaagtcttcagtcaccgccctccggaaattggggatgccacccagatctatcatgaccctccagaaaatatgtatggagggttctctggagatctggaggatttttaaccagactactgctatggcccgcaattagatgactgccctacccctttgctgccgaagaactactgaagactattgaactaaccaactgtgttaagtaagaactaatgcctctttttccctgcatgtatcccctgatcagtgacttattttcttttcctgttgcgccctttgtttagttatttcctttaattactagaattatcttttcgttctccgtctaattgctttttcggtgtaggaacggctacctaaagctggaagtgggaagtgttttcaatgtactttgtgattatagaaatatatgacccgaggtgcattgtttggcatttcctcgagaaa

SEQ ID NO: 1115 - DNA, 3548 bp, Drosophila ananassae
  source 1..3548: mol_type = unassigned DNA
agaatatggatttgattgtgcagagggggtgctataccgtaactcgtaagccatgcaatcagatcaagtcgactcaaaacctcctcgtggtattctctgggtgccagtatttactggtagctgatttgagcggcgaaaggatccttggggttaccggccccctggaaccttaaaacaaattggtgcaactgaaaataacgagcctcggaacctaaatcgttttgtaagaggagaatccacggcttccagcctggagagcacacaatttggaaccagtgcagaggttaaccttgcagggagggtgccctgtacgatatgtgaaatgacgttcagctccaagaggggtttgggcgttcacatgtcacatcggcacaaagacgatcttgatgcacaacgtcttcgtgtcgataaaaaggcaaggtggtcagaggaagaaaccttgatgatggcgagaaaggaggttgagcttgcagcaagtggtgtacgatttcttaataagaagctagcggagattttcacccaccgcagtgccgatgcgatatcttcgtatcggaagaggagtgagtacaaggcaaaactagagcagataagggggcaatccgttcccaccccagaagcagaagaaatcaacaccacacagcgccgccctagtaatagcgagcaaaaccgacgagtaccaagatcagaagggggaccaatcgcaccaaccgaacagacgaacaacgaaatccttagggtactacagggtctagcacctgtagtatgcttaccccggtggagagccgaggtcctgcaaaatatcgtagataatgcgcaggtctcgggacaggaaaccactctccaaagtttatccagttatctcatggaaatttttccgccacggaatgaaccgcacattctgacgaggccccgaacggagcctcgaaatatgagacaacgtagaaggcagcagtacgcgagggttcagcgtaactgggataaacatccggggcgatgcataaagtccctactggaggaagatgatgagtcggtgatgccaaaccaggaggtcatggagccatattggagacgggtaatgactcagcctagctcaagctcgataaaacgcgacatgtttaacatggagcattcactcgagagggtatggtccgctgtgaaccagcgcgatcttagggccacaaaagtcaaattatctagttctccaggcccggacgggatcactccaaaaactgccaggagtgtccccgaaggcattatgcttcgcataatgaacttgatcctctggtgcgggaatttgccgtactctatccgtctggcccgaaccatcttcattccgaagaaggcgacggcaaatcaaccgcaagactatcgtcctatttcagtcccctcggttatagttaggcaactaaatgccattttggcttcccggttgagcgcagccatcaactgggacacgcgtcagcgagggttcctacctaccgatgggtgtgctgataatacgacgattgttgatttagttttgagggaacatcataagcgatttaaatcgtgctacatcgggaccctcgatgttagtaaggcctttgatgctgtagctcacgaagcggtctacaacacattggcttcatatggtgccccgaaaggcttcatcaactacttacggaaggcgtacgagggcggcggcacaatgctcgctgggaacgggtgggtttcagaggcgttcattcctgcccgaggagtgaagcagggtgaccctctgtctcccatactattcaacttggtcattgaccggttgcttaggtccttacccagtgagattggtgccaaagtcggaaatgccatgacaaacgcagcagcattcgcagatgatatagtcctttttgcggaaactccgatggggcttcagaaattgttggacaccaccgtttgtttcctttcctcggtgggtctcacccttaatactgataaatgtttcacggtcagtattaaggggcaagccaaacaaaagtgtaccgtcgtcgaacggcgaagcttcttgattggcgggcgcgagtgtccttcattgaagcgtactgacgagtggaagtacttagggattaaattcactgcggaggggcgggcccggtacgatccagcagaggacctcggtccaaagctgttgagattgactcgggcccccctgaaaccacaacagaagttatttgcccttcggaccgtccttatcccacaactctatcacaagctgacccttgggagtgtgacgataggcgttctgaagaaatttgacaaattagttcgatataccgcacggaagtggttggggcttccggtggacgtaccagtttcttttttccatgccccccacaagagtgggggtctcgggttaccatctctaagatggacagcaccaatgcttcgactaaagcgattgagcaacataaaatggcctcacctcgagcgatccgaggtagccagctctttcgtggaggaagaaatgcggagggcccgggataggcttcaggctggaagtgaagaactgttaacccgttcgcaggtagattcgtacttggcaaatagattgcacatgtctgttgatggttgcgggctccgtgaagcagagcgttttgctccgcaacacgggtgggttagtcagcccacgcgtttgctaacaggaaaggaatatactgatggaatcaaactgcggataaatgccctaccctcaaggtctcgtactacgaggggaaggcacgaattggagagacggtgccgtgcaggatgtgatgctcccgaaacaacaaatcacatcttgcagcaatgctatagaactcacgggaggaggatagctcggcacaacggcgtagtaaattttctcaagcggggacttgagcgaagaggctgcgtcgttcatgttgaaccaagtctgcagggcgaaaccggactgaataaacctgacctggtggctatccgacaaaatcgcatttatgtgattgacactcagattgtgactgacggacattctctcgaccaagcgcaccagcgtaaggtcgggaagtacgatacaccggacatacggacgaatttgcggagatctttcggtgcctttgacattgagttccattccgccactgtgaactggaggggaatatggagtggtcaatcagtaaaacggttgatcgcttcagacctcctcagctctggtgatagcaatatcatcagtgtccgggtaatcagtggtggtctctggagctggcggcagttcatgtatctgtcggggtacactcgcgattggacttagccaatgcacgggttccagattaagcttgctgccgaagcataccatcaaaatcggcataaaattcgcttaataaaggaggtggttttagtacgtaggcgtcccgggacttgtctcgggatgaatcgtgcatgcgtataattgggatcgataacaaataccaactaagttattactaatatatcgaaatacataaatatcccgtccttacgtatctttgaagatttccatcctcagcgaacaaaaaaaaaaaaaa

SEQ ID NO: 1116 - DNA, 3607 bp, Drosophila melanogaster
  source 1..3607: mol_type = unassigned DNA
ttggggatcatggggtatttgagagcagagggggagtattcttctgtaattcgtaagtcatatcatatgatgtgcggaaggggaattttactctgtaactcacaagtctctcctttactcaagtcgactcaaaacctcctcgtggtggtcccggtaatgctaaactcgtttagcagctaatttgagcggaaaaacttttccgatgggctggttccccagaggaaatttattcatattggaactacaagcacaaataacgagcctcggatacctttacacaatctgatgacgacccgaccctccgtggatatcttcccggaggaccaatatgaaccaaacgcagcggctactctatctagggttccctgcacagtatgtggccggtcctttaacagcaagagaggactcggtgttcacatgcgatctcggcacccagacgaacttgatgaagaacgtcgacgtgtcgatataaaggcaagatggagtgatgaagagaagtggatgatggcgagaaaggaggttgagctcacagcaaatggatgtaaacacataaacaagcaactagcggtgtattttgcaaaccgcagcgtcgaagccatcaaaaagctaagacagaggggcgattataaggagaaaatagagcagataagagggcaatcagctctcgccccggaagttgctaatctaaccataaggcgccgccctagtagaagtgagcaagaccaccaagtaacaacatcggaaacaactccaatcactcccttcgaacagtcgaacagggaaattttgcggacactacgcgggtatagccccgtagaatgccattccaaatggagagcccaagagttgcaaactatcattgatagggcacatctcgagggaaaggaaaccactctccaatgcttatcgctatatctcctgggaatttttccggcacagggtgtacgacacacactgacgagacctcctcggagacctcggaacaggagagaaagcagaaggcagcagtacgctgtcgtccagcgtaactgggataagcataaaggaagatgcatcaagtccttgctaaatggaactgatgagtcggtaatgccaagccaagaaataatggttccctactggagagaagtaatgactcagcctagcccaagctcttgcagtggagaagtgatacaaatggatcactcgcttgagagggtatggtctgctattacagagcaggaccttcgggcgtcaagagtctcattatcctcgtctccggggcctgacgggataactccaaaatctgccagggaggtgccgtcaggtattatgctgcgcataatgaacctaattctatggtgcggtaatctaccacactccatacgactggccagaaccgtcttcatcccgaagacggtgacggcgaagcgaccgcaagactttcgtccaatatcagtgccttcagtcctggtaagacagctaaatgcaatattggcaacccggttgaactcatcaatcaattgggacccgcgccagcggggcttcttaccaaccgacggatgcgccgataatgcgacgatagtcgacttagtcttgaggcatagccataagcactttagatcttgctacatcgcaaatttagatgtaagcaaggcatttgattctctatcacatgcatctatatacgacaccttacgtgcttatggtgcgccaaagggcttcgttgactacgtacagaacacgtacgagggcggtggtaccagtctcaatggggacggttggagttcagaggaattcgtccctgctagaggagtgaagcagggtgaccctttgtctcctattctatttaacttggtaatggacaggttacttagaaccttacccagcgaaattggtgccaaagtcggaaatgccattactaacgcggccgcgtttgcagatgatttggtactatttgcggaaactcggatggggcttcaagtattgttggacaagacgttggattttctatctatcgtcggcctcaaacttaatgccgacaaatgttttaccgttggcattaagggccagccgaaacagaagtgtaccgtgttagaggcacagagcttctacgtaggctcgagtgagattccatcactgaagcgcacggacgagtggaagtacttaggcatcaacttcactgcaaccgggagggttcgatgcaatccggccgaggacattggtccaaagctacaaagattgacaaaggcccccctcaaaccacaacagaggttgttcgcccttcggactgtccttatcccacagctctaccacaagttagcccttgggagtgtggcgataggcgtcctaagaaaaactgataaacttataagatattatgtgcgaagatggctaaatcttccgctggatgtgccgatagcatttgttcatgcacccccaaaaagtggaggtctcggaattccatcactaagatgggtagctccaatgttaaggctaagacgcttgagtaacattaaatggcctcacctcacgcaaaacgaggtagccagctctttcctcgaagccgaaaaacaacgggcccgagatagattattagctgaacaaaatgaactgttatcgcgtccggcaatagaaaaatattgggcgaacaagttgtacctctcagttgatggtagcggactccgtgaaggcggccattatggcccgcaacacgggtgggttagtcaacccacgcgtttattaacaggaaaggaatatatggacggtattcgtctgcggataaatgccctacccacaaagtctcgtactacaaggggaaggcacgaattggaacgacagtgtcgtgcaggatgtgatgctcccgaaacaacaaaccacataatgcaaaaatgctaccgctcgcatgggaggcgggtagctagacacaactgcgtagtaaatcgaatcaagcggggacttgaggagagaggctgcgtggtcattgttgaaccaagtctgcagtgcgaatccggccttaataaaccagacctggtggcactacgacaaaatcacattgatgtgatcgacacacaaattgtgacagacggacactctatggatgatgcgcaccagcgcaaaatcaatagatacgacagaccggacatacgaactgaattgcgtcgcagattcgaagccgcaggtgacattgaattccattctgccaccctgaactggagggggatctggagtggtcaatccgttaaaagattgatagcaaagggtctcctcagcaaatatgatagtcatatcattagcgtccaggttatgagaggcagtctcggttgttttaaacagttcatgtacctgagcgggttttcccgagattggacttagctaaatcgtttggttcaaaacatttgcttgctgtcttggcataacatcaataaaggcataaacatcgcaaaataatggttataattaaatggctatgaggatggttttagtacgtaggcgttgcggaacttcggttcatatagagcaatgaatcgtgcatgctaggaaaactgaccacacacagtgttggcagacctagtatctttcgaagatttccatacctccgcgatcaaaaaaaaaaaaaaaaaaaaaa

SEQ ID NO: 1117 - DNA, 3533 bp, Drosophila persimilis
  source 1..3533: mol_type = unassigned DNA
aagatatggatctgaataatagcgtagaaggggagtcattccgtaattcgtaaatcgtaaaaatcagatcaagttgattcaagacctcctcgtggtatcttctggatgctattagactgaagttcttttggtctaatagtaactaacttgaacagcgaaacagtcctatggggttgccagccccttggacagttcagtttgattggcactaatatgcaaaatacaacgcctcggataataaacactaattcgttgacgaaccaaatccctacggtctctagcctaggggcccaatctgaacatagtgcacaggttaacccaaacagtggttaccaatgcacgatatgtgaatcgtctttccgtagcaaaagcggactaggcgttcacatgtcacgtcggcacaaggacgagtttgatcaacttcgtctgcgtaccgaccgtaaggcacaatggagtgaggaagagttgagtatgatggcaagaaaagagatcgagctcgcagcaaatggagaaagatatctaaataagaagctagcggaagtatttacgaaccgtagcgtcgacgctatcaagaaatgtcgacagagggagagatataagaccaaaatcgaacagctaaagggtcaagctgttcctctcccagaagcattagaatctgaaaccatacagcgccgccctagtatacgcgagcgagatctcctagtaacgccacctaacactctcggaaccactccaaccgaactgtcgaacagtgaaatcctggcagtactacaggggtacccacctgtagtatgcaatgaccaatggagagttgaggttttgcaatccatcgtagatggtgcgcaggcctcgggtaaggaaattactcttcagcgcttgtctacttaccttatggaagtatttccctcacagaatgaccgccccattcaaacgagacctccacggagacctcgtaataggagacaaggtaggagacagcagtacgccttaacacagcgtaactgggacaagcacaaaggtcgttgtataaaagccattttggatggaactgaggggacagcaactatgccaagtcaaggtatcatggggtcctattggagacaagtcatgacacaaacaagcccaacatatagtggtacgaacaccacgttccggacggaacacccacttgaaggggtttggtccccgataacactaggggacctaagggtacacagagtgtcattgacgaaatctccaggacctgatggaattactccaagaactgtcaggagtattccgtcaggagttatgcttcgcataatgaacctgatactttggtgcggaaagttgcctgtctccatccgacaggcacgaaccatcttcattccgaaggtggggaatgcttctcgaccgcaagactttcgtccaattacggtacaatctgttatggtaaggattttaaatgccattttggcttcccggttgacctcatcagtcgactgggatccgcgtcagcgaggtttccttccaaccgacggatgtgccgataatacgacgatagtcgacttaatcttaagggatcaccataaacgttgtaaatcactttatatcgcaactttagatataagcaaagcatttgactcggtgtctcatgcagcagttagcgccactctaactgcatatggtgcccctaaagaattcgttgactacgtacaaaattcgtacgaggtctgtggcacaacgctcaatggggacggatggagatcagaggaattcatacctgctcgaggtgtcagacagggtgacccgctatctcccataatattcaacttgatcatcgatcagttgcttaggtcctaccccaatgagattggtgccacaatcggtgatcacacaacaaacgcggccgcgttcgcagatgatattgtcttatttgcggaaactcgtttaggccttcaaacaatgctagacacgactgtcgattttctatcttcagtcgggcttacccttaactcggataaatgttttacagttggaataaaggggcaaccgaaacagaagtgtactgtggtcatcccagagaccttccgtatcggttcgcgctcgtgtcctgcattgaagcgcacagacgagtggaagtatttaggcataacattcactgcacaagggaggaccaggtacagtccagccgacgacctaggtccgaagctgttgaggctgacaaggtcccccctaaaaccacaacagaaattgttcgcactcagaacagttcttatcccacaactttaccataagctgaccctaggtagtgtgatgataggtgttctgagaaagtgtgacatactggtacgttcgaccgtaaggaagtggttagggcttcctctggacgtgtcaactgcattcttccatgctcctcatacttatgggggcctcggaatcccttcagttcgttgggtagcgccaatgctacgtatgaaaagattgagcaatattaagtgggcccacctcgcgcaatccgaggcggccagctcatttcttaccgacgaattgaataaggcccggggtagaactctggctggactgaatgagttgacatcgcgtacagagatcgaaacgtactgggcgaacaggttgtatatgtctgttgatggtcgcggcttacgtgaagcgggactttttcgtccccaacacggctgggtgtgtcagcccacgcgtttgctaacaggtcaagattaccgaaacagtatcaagctgcgaataaatgccctaccatcgaggtctcgtaccacgaggggcagaaatgaattggaacggcaatgtcgtgcaggttgtgatgctcccgaaacaacaaaccacatcctgcagaattgttaccgtacgcatgggaggcgggtagcaagacataactgtgtagtcaataaccttaagaggattcttgaggagaagggccacacagtacacgtcgaaccaagtttgcagctggaaacctcggtaagtaaaccagacctggtgtgtatccgtgacaatcacgcttgcgtgattgatgcgcagattataacggatggactgtttctcgacgatgtgcaccatcgcaaagttgagaaatataaaagaccggaagttatatctgcactgcggagagaattcggagtgtcgggcaacgtcgaagtcctatccgcgacgttaaactggcgtgggatctggagcaatcaatccgttagaagattgatagcaaagggtctcatctcatccggtgacagcaatgtcattagcgccagagtggtaacaggcggactatattgcttcagacagttcatgtatctcgcaggttacactcgagattggacttagcctatacactatgttggagagaagacgcttgctacctaggcaaaatgtgaaattaggtataaacatcgtggttgtaaaacttgaggtgggtttttagtacgtatgcgtgattacttcgtaatcatgaatcgtgcatgctagtggggtttggcctccactagtatctttgaagattttccttcctcagcgatcaaaaaaaa

SEQ ID NO: 1118 - DNA, 3557 bp, Drosophila pseudoobscura
  source 1..3557: mol_type = unassigned DNA
caattggaaagatatgggtctgaataatagcgtagaaggggagtcattccgtaattcgtaaatcgtaaaaatcagatcaagttgattcaagacctcctcgtggtatcttctggatgctattagactgaagttcttttggtctaatagtaactaacttgaacagcgaaacagtcctatggggctgccagccccttggacagttcagtttgattggcactaatatgcaaaatacaacgcctcggataataaacactaattcgttgacgaaccaaatccctacggtctctagcctaggggcccaatctgaacatagtgcacaggttaacccaaacagtggttaccaatgcacgatatgtgaatcgtctttccgtagcaaaagcggactaggcgttcacatgtcacgtcggcacaaggacgagtttgatcaacttcgtctgcgtaccgaccgtaaggcacaatggagtgaggaagagttgagtatgatggcaagaaaagagatcgagctcgcagcaaatggagaaagatatctaaataagaagctagcggaagtatttacgaaccgtagcgtcgacgctatcaagaaatgtcgacagagggagagatataagaccaaaatcgaacagctaaagggtcaagctgttcctctcccagaagcattagaatctgaaaccatacagcgccgccctagtatacgcgagcgagatctcctagtaacgccacctaacactctcggaaccactccaaccgaactgtcgaacagggaaatcctggcagtactacaggggtacccacctgtagtatgcaatgaccaatggagagttgaggttttgcaatccatcgtagatggtgcgcaggcctcgggtaaggaaattactcttcagcgcttgtctacttaccttatggaagtatttccctcacagaatgaccgccccattcaaacgagacctccacggagacctcgtaataggagacaaggtaggagacagcagtacgccttaacacagcgtaactgggacaagcacaaaggtcgttgtataaaagccattttggatggaactgaggggacagcaactatgccaagtcaaggtatcatggggtcctattggagacaagtcatgacacaaacaagcccaacatatagtggtacgaacaccacgttccggacggaacacccacttgaaggggtttggtccccgataacactaggggacctaagggtacacagagtgtcattgacgaaatctccaggacctgatgggattactccaagaactgtcaggagtattccgtcaggagttatgcttcgcataatgaacctgatactttggtgcggaaagttgcctgtctccatccgacaggcacgaaccatcttcattccgaaggtggggaatgcttctcgaccgcaagactttcgtccaattacggtacaatctgttatggtaaggattttaaatgccattttggcttcccggttgacctcatcagtcgactgggatccgcgtcagcgaggtttccttccaaccgacggatgtgccgataatacgacgatagtcgacttaatcttaagggatcaccataaacgttgtaaatcactttatatcgcaactttagatataagcaaagcatttgactcggtgtctcatgcagcagttagcgccactctaactgcatatggtgcccctaaagaattcgttgactacgtacaaaattcgtacgaggtctgtggcacaacgctcaatggggacggatggagatcagaggaattcatacctgctcgaggtgtcagacagggtgacccgctatctcccataatattcaacttgatcatcgatcagttgcttaggtcctaccccaatgagattggtgccacaatcggtgatcacacaacaaacgcggccgcgttcgcagatgatattgtcttatttgcggaaactcgtttaggccttcaaacaatgctagacacgactgtcgattttctatcttcagtcgggcttacccttaactcggataaatgttttacagttggaataaaggggcaaccgaaacagaagtgtactgtggtcatcccagagaccttccgtatcggttcgcgctcgtgtcctgcattgaagcgcacagacgagtggaagtatttaggcataacattcactgcacaagggaggaccaggtacagtccagccgacgacctaggtccgaagctgttgaggctgacaaggtcccccctaaaaccacaacagaaattgttcgcactcagaacagttcttatcccacaactttaccataagctgaccctaggtagtgtgatgataggtgttctgaggaagtgtgacatactggtacgttcgaccgtaaggaagtggttagggcttcctctggacgtgtcaactgcattcttccatgctcctcatatttatgggggcctcggaatcccttcagttcgttgggtagcgccaatgctacgtatgaaaagattgagcaatattaagtgggcccacctcgcgcaatccgaggcggccagctcatttcttaccgacgaattgaataaggcccggggtagaactctggctggactgaatgagttgacatcgcgttcggagatcgaaacgtactgggcgaacaggttgtatatgtctgttgatggtcgcggcttacgtgaagcgggactttttcgtccccaacacggctgggtgtgtcagcccacgcgtttgctaacaggtcaagattaccgaaacggtatcaagctgcgaataaatgccctaccatcgaggtctcgtaccacgaggggcagaaatgaattggaacggcaatgtcgtgcaggttgtgatgctcccgaaacaacaaaccacatcctgcagaattgttaccgtacgcatgggaggcgggtagcaagacataactgtgtagtcaataaccttaagaggattcttgaggagaagggccacacagtacacgtcgaaccaagtttgcagctggaaacctcggtaagtaaaccagacctggtgtgtatccgtgacaatcacgcttgcgtgattgatgcgcagattataacggatggactgtttctcgacgatgtgcaccatcgcaaagttgagaaatataaaagaccggaagttatatctgcactgcggagagaattcggagtgtcgggcaacgtcgaagtcctatccgcgacgttaaactggcgtgggatctggagcaatcaatccgttagaagattgatagcaaagggtctcatctcatccggtgacagcaatgtcattagcgccagagtggtaacaggcggactatattgcttcagacagttcatgtatctcgcaggttacactcgagattggacttagcctatacactatgttggagagaagacgcttgctacctaggcataatgtgaaattaggtataaacatcgtggttgtaaaacttgaggtgggtttttagtacgtatgcgtgattacttcgtaatcatgaatcgtgcatgctagtggggtttggcctccactagtatctttgaagattttccttcctcagcgatcaaaaaaaaaaaaaaaaaaaaaaaa

SEQ ID NO: 1119 - DNA, 3595 bp, Drosophila sechellia
  source 1..3595: mol_type = unassigned DNA
gggatcaggggtaattgcgagcagagggggagtatttttctgtaattcgtaagtcatatcatatggtgtgcggaaggggaattttactctgtaactcacaagtctctcctttactcaagtcgactcaaaacctcctcgtggtggtccccggtaatgctaaacttgtttagcagctaatttgagcggcaaaacttttccgatgggttggttccccagaggaaatttattcatattggaactacaaatagaaataacgagcctcggagcaatttacgcaatctgatgacgacccgaccctccgtggacatcttcccggaggaccaatatgaaccaaacgcagcggctactctatctagggtaccctgcacagtatgtggccggtcctttaacagcaagagaggactcggtgttcacatgcgatctcggcacccagacgaacttgatgaagaacgtcgacgtgtcgatataaaggcaagatggagtgaggaagagaagtggatgatggcgagaaaggaggttgagctcacagcaaatggacataaacacataaacaagcaactagcggtgtattttgcaaaccgcagcgtcgaagccatcaaaaagctaagacaaaggggcgattataaggagaaaatagagcagataagaaggcaatcagctctcgtcccggaagttgcaaatctaaccataaggcgccgccctagtagaagtgagcaaaaccaccaagtaacaacatcagaaacaactccaatcacacccttcgaacagtcgaacagggaaattttgcggacactgcgtgggtatagccccgtagaatgccattccaaatggagagcccaagagctacaaacgatcattgacagggcagagctcgagggaaaggaaaccactctccaatgcttatcgctatatctcctaggaatttttccggcacagggtgtacgtcacactctgacgagacctcctcggaggcctcgaaataggagagaaagcagaaggcagcagtatgctgtcgtccagcgtaactgggataagcataaaggaagatgcatcaagtccttgctaaatggaactgatgagtcggtaatgccaagccaagaagtaatggttccttactggagagaagtaatgactcagcctagcccaagctcttgcagtagagaagtgatacaaatggatcactcgcttgagagggtttggtctgctattacagagcacgaccttcgggcatcaagaatctcattatcttcatctccggggcctgacgggataactccaaaaacagccagggaggtgccgtcaggtattatgttgcgaataatgaacctaattctatggtgcggcaatctaccacactctatccgactggccagaaccgtcttcatcccgaagacggtgacggcgaagcgaccgcaagactttcgtccaatatcggtgccttcagtcctggtaagacagctaaatgcaatattggcaacccggttgaactcatcaatcaattgggacccgcgccagcggggcttcttacctaccgacggatgtgccgataacgcgacgatagttgacttagtcttgaggcatagccataagcactttagatcttgctacattgcaaatttagatgtaagcaaggcattcgattctttatcgcatgcatctatatatgacaccttacgtgcttatggtgcgccaaagggcttcgttgactacgtacagaatacgtacgagggtggcggtaccagtctcaatggggacggttggagttcagaggaattcgtccctgctagaggagtgaagcagggtgaccctttgtctcctattctatttaacttggtaatggacaggttacttagaaacctacccagcgaaattggtgccagagtcggaaatgccattactaacgcggccgcgtttgcagatgatttggtactatttgctgaaactcgaatgggacttcaagtattgttggacagaacgttggattttctatctctcgtcggcctcaaacttaatgccgacaaatgttttaccgttggcattaagggccagccgaaacagaagtgtaccgtgctagaggcacagagcttttacgtaggctcaagggagattccatcattgaagcgaacggacgagtggaagtacttaggcatcaacttcactgcaaccgggagggttcgatgcaatccggccgaggacattggtccgaagctacaaagattgacaaaggcccccctcaaaccacaacagaggatgttcgcccttaggactgtccttatcccacagctctatcacaagttagcccttgggagtgtggcgataggcatcctacgaaaaactgacaaactaatacgatactatgtgcgaagatggctaaatcttccgctggatataccgatagcattcattcacgcacccccaaaaagtggaggtctcggaattccatcacttagatgggtagctccaatgttaaggctaagacgtttgagtaatattaaatggcctcacctcacgcaaaacgaggtagccagctctttcctcgaagcagaaaaacaacgggcccgagatagattattagcagaacaaaatgaattgttatcgcgtccggcaatagaaaaatattgggcgaacaaattgtacctctcagttgatggtagcggactccgtgaagcaggccattggggcccgcaacacgggtgggttaatcaacccacgcgtttactaacaggaaaggaatatatagacggtattcgtctgcggataaatgccctacccacgaagtctcgtactacaaggggaaggcacgaattggaacgacagtgtcgtgcaggatgtgacgctcccgaaacaacaaaccatattatgcaaaaatgttaccgatcgcatgggaggcgcatagctagacacaactgcgtagtaaatcgaatcaagcggggacttgaggagagaggctgcgtagtcattgttgaaccaagtctgcagtgcgaatccggtcttaataaaccagacctggtggcactacgacaaaatcacattgatgtgatcgacatacaaattgtgacagacggacactctatggatgatgcacaccagcgcaaaatcaatagatacgacagaccggacatacgaactgagttgcgtcgcagattcgaagccgcaggtgacattgaattccattctgccaccctgaactggagggggatctggagtggtcaatccgttaaaagattgatagcgaagggtctcctcagcaaatatgatagtcatatcattagcgtccaggttatgagaggcagtctcggttgttttaaacagttcatgtacctgagcgggttttcccgagattggacttagctaaaacgtttggttcaaaacatttgcttgctgtcttggcataacatcaataaaggcataaacatcgcaaataatggtaatatataaattggctatgaggatggttttagtacgtaggcgttgcggaacttcggttcagatagagcaatgaatcgtgcatgctaggaaactgaagtgttgacagacctagtatctttcgatagatttccatacctccgcgatcaaaaaaaaaaaaaaaaaaaaa

SEQ ID NO: 1120 - DNA, 3607 bp, Drosophila simulans
  source 1..3607: mol_type = unassigned DNA
gggatctggggtaattgcgagcagagggggagtatttttctgtaattcgtaagtcatatcatatggtgtgcggaaggggaattttactctgtaactcacaagtctctcctttactcaagtcgactcaaaacctcctcgtggtggtccccggtaatgctaaacttgtttagcagctaatttgagcggcaaaaacttttccgatgggctggttacccagaggaaatttactcatattggaactacgaacacaaataacgagcctcggatatctttacacaatctgatgacgacccgaccctccgtggatatcttcccggaggaccaatatgaaccaaacgcagcggctactctatctagggttccctgcacagtatgtggccggtcctttaacagcaagagaggactcggtgttcacatgcgatctcggcacccagacgaacttgatgaagaacgtcgacgtgtcgatataaaggcaaggtggagtgaggaagagaagtggatgatggcgagaaaggaggttgagctcacagcaaatggacataaacacatgaacaagcaactagcggtgtattttgcaaaccgcagcgtcgaagccatcaaaaagctaagacagaggggcgattataaggagaaaatagagcagataagagggcaatctgctctcgtcccggaagttgcaaatctaaccataaggcgccgccctagtagaagtgagcaaaaccaccaagtaacaacatcagaaacaactccaatcactcccttcgaacagtcgaacagggaaattttgcggacactgcgtgggtatagccccgtagaatgccattccaaatggagagcccaagagctacaaacgatcattgacagggcagagctcgagggaaaggaaaccactctccaatgcttatcgctatatctcctgggaatttttccggcacagggtgtacgacacacgctgacgagacctcctcggagacctcggaataggagagaaagcagaaggcagcagtatgctgtcgtccagcgtaactgggataagcataaaggaagatgcatcaagtccttgctaaatggaactgatgagtcggtaatgccaagccaagaagtaatggttccctactggagagaagtaatgactcagcctagcccaagctcttgcagtggagaagtgatacaaatggatcactcgcttgagagggtttggtctgctattacggagcatgaccttcgggcgtcaagaatctcattatcttcatctccggggcctgacgggataactccaaaatctgccagggaggtgccgtcaggtattatgttgcgaataatgaacctaattctatggtgcggtaatctaccacactctatccgactggccagaaccgtcttcatcccgaaaacggtgacggcgaagcgaccgcaagactttcgtccaatatcggtgccttcagtcctggtaagacagctaaatgccatattggcaacccggttgaactcatcaatcaattgggacccgcgccagcggggcttcttacctaccgacggatgtgccgataatgcgacgatagttgacttagtcttgaggcatagccataagcactttagatcttgctacatagctaatttagatgtaagcaaggcattcgattctttatcgcatgcatctatatatgacaccttacgtgcttatggtgcgccaaagggcttcgttgactacgtacagaatacgtacgagggtggcggtaccagtctcaatggggacggttggagttcagaggaattcgtccctgctagaggagtgaagcagggtgaccctttgtctcctattctatttaacttggtaatggacaggttacttagaaacctacccagcgaaattggtgccaaagtcggaaatgccattactaacgcggccgcgtttgcagatgatttggtactatttgctgaaactcgaatgggacttcaagtattgttggacaaaacgttggattttctatctctcgtcggcctcaaacttaatgccgacaaatgttttaccgttggcattaagggccagccgaaacagaagtgtaccgtgctagaggcacagagcttctacgtaggctcgagggagattccatcactgaagcgaacggacgagtggaagtacttaggcatcaacttcactgcaactgggagggttcgatgcaatccggccgaggacattggtccaaagctacaaagattgacaaaggcccccctcaaaccacaacagaggatgttcgcccttaggactgtccttatcccacagctctatcacaagttagcccttgggagtgtggcgataggcgtcctacgaaaaactgacaaattaataagatattatgtgcgaagatggctaaatcttccgctggatgtgccgatagcattcattcatgcacccccaaaaagtggaggtctcggaattccatcactaagatgggtagctccaatgttaaggctaagacgattgagtaatattaaatggcctcacctcacgcaaaacgaggtagccagctctttcctcgaagccgaaaaacaacgggcccgagatagattattagcagaacaaaatgaattgttatcgcgtccggcaatagaaaaatattgggcgaacaaattgtacctctcagttgatggcagcggactccgtgaagcgggccattggggaccgcaacacgggtgggttaatcaacccacgcgtttactaacaggaaaggaatatatagacggtattcgtctgcggataaatgccctacccacgaagtctcgtactacaaggggaaggcacgaattggaacgacagtgtcgtgcaggatgtgacgctcccgaaacaacaaaccacataatgcaaaaatgttaccgatcgcatgggaggcgcgtagctagacacaactgcgtagtaaatcgaatcaagcggggacttgaggagagaggctgcgtggtcattgttgaaccaagtctgcagtgcgaatccggccttaataaaccggacctggtggcactacgacaagatcacattgatgtgatcgacatacaaattgtgacagacggacactctatggatgatgcacaccagcgcaaaatcaatagatacgacagaccggacatacgaactgaattgcgtcgcagattcgaagccgcaggtgacattgaattccattctgccaccctgaactggagggggatctggagtggtcaatccgttaaaagattgatagcaaagggtctcctcagcaaatatgatagtcatatcattagcgtccaggttatgagaggcagtctcggttgttttaaacagttcatgtacctgagcgggttttcccgagattggacttagctaaaacgtttggttcaaaacatttgcttgctgtcttggcataacatcaataaaggcataaacatcgcaaaataatggttatatataaatggctatgaggatggttttagtacgtaggcgttgcggaacttcggttcagatagagcaatgaatcgtgcatgctaggaaaactgaccacacgcagtgttggcagccctagtatctttcgatagatttccatacctccgcgatcaaaaaaaaaaaaaaaaaaaaaaa

SEQ ID NO: 1121 - DNA, 3548 bp, Drosophila yakuba
  source 1..3548: mol_type = unassigned DNA
gggaacatggggtaaaggtgagtagagggggagtattttttatactctgcaactcataagtcttgcctttactcaagtcgactcaaaacctcctcgtggtgtttcccggtaatgttaaacttgtttagcagctaatttgagcggcgaatctttccgaaagggttggttcccctgacgaaggataatcatattggtaccacaaatttacaaaacgagcctcggatatttactaatgatctgttgacgacccgaccctccgtggatcacgtcccggaggaccaatatgaaccaaacgcagcggctactctatcaagggttccctgcacagtatgtgaccggtcctttaacagtaagagaggactcggtgttcacatgcgatctcggcacccagacgaacttgatgaagaacgtcgacgtgtcgatataaaagcaaggtggagtgaggaagagaagtggatgatggcgagaaaggaggtcgagctcatggcaaatggttttaaacacataaacaagcaactagcggtgtattttgcaaaccgtagcgtcgaagccattaaaaagctgagacagaggggcgattataaggagaaaatagagcagataagagggcaatccgctctcgccccagaagttgctaatctaaccataaggcgccgccctagtagaagtgagcaagaccaccaagtaccaacgtcagaagcatctccaatcactccgctcgaacagtcgaacagggaaattttgcggacgctgcgtgggtatagccccgtagtatgcccttccaaatggagagcccaagaactacaaactatcattgatagggcggaatttgagggaaaggaaaccactctccaatgcttatcgctctacctccagggaatttttccggtacagggtgtacgacacacgctgacgaggcctcctcggagacctcggaataggagggaaagcagaaggcagcagtacgctgtcatccagcgaaactgggataagcataaaggaaggtgcattaagtccctgcttaatggaactgatgaatcggtaatgccaagccgagaatttatggagccctactggagagaagtaatgactcagcctagcccaagctcttgcaatggagaagtgattcgtacggatcactcgcttgagacggtatggtctgcaataacggaacaagaccttagggcatcaagagtttcattatcttcatctccggggcctgacggggtaactccaaaaactgccagggaggtgccgtcaggtattatgctacgcataatgaacctaattctatggtgcggtaacttacctcattctatccgactggccagaaccatcttcatcccgaagacggtgacggcaaagcgaccgcaagactttcgtccaatatcggtgccttccgtcctggtaagacagctaaatgccatcttggcaacccgattgacctcatcaatcgattgggacccgcgccagcggggcttctcaccaaccgacggttgcgccgataatgcgacgatagttgacttagtcctgaggcatagccataagtactttaaatcttgctacatcgccaacttagatgttagcaaggcatttgactcattgtcacatgcagcaatatatgggacattacgagcttatggtgcgccgaagggttttgttgactatgtacagaagacgtacgagggaggtggtatcagtctcaacggggaaggttggtgttcagaggaattcgtgcctgctagaggagtgaagcagggcgaccctttgtcccccattctatttaacttggtcatcgaccggttacttagagccctacctagcgagattggtaccaaggtcggaaatgccatgataaacgctgctgcatttgcagatgatttggtactatttgcggaaactcggatgggacttcaaactttgttggacaagactgtggactttttatccaccgtcggccttaaacttaatgctgataagtgctttactgtcggtattaagggacagccgaaacagaagtgtactgtgctagaggcacagagcttctgcgtaggctcgagagagattccaacactgaagcgtactgacgagtggaagtatctcggtatacatttcactgcaagtgggagggttcgatgcaatccggcagaggacattggtccaaagctacaaagattgtcagaggccccccttaagccacaacagaggttgttcgcccttcggactgtcctgatcccacaactctatcacaagttatcccttgggagtgtgacgataggcgtcttacgaaagactgacaagctaatacgtttctatgtgcgaagatggctaaatcttccgtcggatgtgccgatagcattcgttcatgcccccccaaaatgtgggggtctcggaattccatcactaagatgggtagcaccaatgttacgacttagacgattgagcaacataaaatggccccacctcgtacaatccgaggaagccagctccttcatcgaagcggaaaaacaaagggcccgaggtagattgatagctgaacaaaatgaattgttatcgcgtccggcaatagaaaagtattgggcgaacaggttgtacctctccgttgatggtggcggactccgtgaagcgggccactatggtccccaacacgggtgggttagtcagcccacgcgtttactaacaggaaaggaatatttagacggtattcggctgcggataaatgccctacccacaaagtctcgcactacgaggggaaggcacgaattggagaggcagtgtcgtgcaggatgtgatgctcccgaaacaacaaaccacattatgcaaaaatgctatcgttcgcatgggaggcgagtagctagacacaactgcgtagtaaatcgaatcaagcggggacttgaggagagaggctgcgtggtcattgccgaaccaagtctgcagtgcgaatccggccttaataaaccggacctggtggtactccgacaaaatcacattgatgtgattgacgtgcaggttgtgacagacggacattctatggacgaagcgcatcagcgcaaaatcaatagatacgacagaccggacatacgaactgaattgcgtcgccgattcgaagccgcaggtgacatcgagtttcattctgccaccctaaactggagggggatttggagtggtcaatccgtaaaacgattgattgcgaagggtctcctcagcaaatatgatagtcatatcattagcgtccaggttatgagaggcagtcttggctgttttagacagttcatgtaccttagcgggttttctcgtgattggacgtagcttaaaacgtttggttcacatacatctgcctgctgccttggcacaatatcaaaaaggcataaacatcgcacatattggttatttacggctatgaggatggttttagtacgtaggcgttgcggaacttcggttcggatagagcaatgaatcgtgcatgctaggaactgaccaaataacagcagccctagtatctttcgaagatttccatacctttgcgatcaaaaaaaaaaaaaaaaaaa

SEQ ID NO: 1122 - DNA, 4482 bp, Kalotermes flavicollis
  source 1..4482: mol_type = unassigned DNA
gagaggtcactgttgctgatcagctggacacctagctgactgcgtgcatgcgtgcacgccgcgcgccgcctcctcgtggtaccgctggtaacgcagggtcactgagactacctgcggctaaaggcgcgcgcgagggattgtaagtccaccacctccacgtggttccccgcgggcaacggcatagttcatctgccggccaagcgtgccgttccctcgatcctcctctgattagggataggaggggggcggtggctcccgccgacgacctggcaaacaccttggacacgctaagataataggccgtcctccgggccggccgaatcataagcacacaatggaagtccctctaacatcaagcctcggatctggggcaacccaagctcccgggaccccagaattattaggggagcacaccgttgaacgacctggccttgatcaaggacattcttatggtttgttaatggatgacgtagagctgccggtgaggttaccattttttgggcctctcatatgcccaggatgcaggacgctgctcacctctgaggaaacgattagcagccatcataggagggtccaccctgatgcccggacgaggtgggtctgctatggttgtgattccccatttatgacataccgggccattaaatgtcacttacctaaatgctctggcaggaaggtagtgacaggggatcacatctgtaatggctgcacaaagcggtttgagtctcagagaggtctctcactgcataaaaggagagcccatccgggtcttcggaacgaggaaatgcttgagcctcctgtgagagctgagcgacgccctaacgcacataaatcctcaatatggagcattgatgagattcgtatcctggagcaatatgaggctgcctacgtcggcgatctccacatcaacatgaagatagctgctcacctgccgttcaaaaccaataaacaagtgagcaactatcggaacgatcgccgtaaaaagtccagaacggcgactgacgcgagccaacagggacttggtcccaatgacggcaatagaggaattgtccccagcgggcagtcatccccgttatttttagagggctctgacgccgagggggacgaggatgtttttaatgtcctagtgccgcccaccctagggggtcttgaacctgctggacaggttcattcactctctgagggggaaacttcgccgctggtcggcgaagcggatccctgttttatgggtggcacgccgtctgccggagaggcctcgggctcaaccttgttgggtccggatcccaccccggcagatggatattctctggtcaggaaagacttacagctcagtgtgcagacatccccgttattagcagtgggctctgtcggcactgagtctgtgcaatttgaacgtggggtgttatcgtgcggtacgccaccagaatttttacacccggaacagtttgcacattgtgcaaacaatgacccggttttgaacgcgtcagaggagcaggtgcacgccccactaggggaagaagccaatgacctccctgacaacaaccatccgtcggagctgggggttgaccccgaagacccgacgtgtagtcccgcaacggaacaggtccaaccctcttctgaggaagaagccgatgacccgtttgcgcaattcaaggcgtggcgaagaagggtggcttcctatgccttgaagatcgagaccggggttcttccagcccaagtagatgacctccttcggagactgagggatggggacacacagtctaaggtaacgtgcgaggaggtggaggaagtggttttatccctcactagaacgatactgggtggcacggcacccaaaaagcgcgttgagggtcgaacgaagtggacgtacaaaagtcgaaccaaccatgaggctcgcaagcgtataatgtacgctagatgccaggacttatatcgcaggcggcctcagcgacctgtggagagggccgtcggataccaggcggaggaatctcttcttgacaaccaagatgagagaccatcccacggagcctttgaaaccttctatactgggctctggggtaagtccggtcaatgcaatatcacaatgcctcctggtgtgcctcggcacaccgggcatgtactgagggaagttacgccaaaggacatctactcgaggctgaggaaactaaagaaagactatgcacccggcccggatggcgtaactaaattgaaggtgcagagcatgggagcatatccctcacttcttgcaaaggtatataatctggtgatgctaaccggttacttctccagttgttggaaggaacataagacctctctaattcctaaggatagaggaagcccaatggatgtcagtaattggagaccgattacgattggctccttactcagtcggatttatacgggtctcatagaacggaggctgaggacagtttctgacatccaccaaaggcaggtagggtttatgcccgtcaatggttgtgccgccaacttgtttatatttgatgaatgcatccgacaagccaaaaaagaggggacaattgtcggcagtcttatagacgtcgccaaagcatttgataccgtaccccatgaagccatcctacgggcgttgagctcgcaaggtgtagatgagcacacgatggctcacataagagacatgtattccggtatccgtacgcggatcaacggcaaagggagcgatatccctctggtgagaggagtgaagcaaggtgatcctctatccccaatgctctttaatatggtgatggaccctctcatacgagacctacagaggaagggcttcagaattggcggccacgagataggggcgttggcctttgcggatgacatcgtcttgttggcggactccattgatggggcccaggatcatgtagatcaggttgggcgctacatgaataaactgggcatgaccctcaatccacgaaaatcgtcctccttcctcatcactgcgatgaggaagacctggatatgtagggacccgggcttgtcaataggggagactaaggtgcctggcgccagaccctcctctgcacttaaatatctcggagtaaactacacactctcggaaggcctggagagtggtgccttgatagacaagctcatgcaggccgttaacagagcacgaggtttggcccttaaaccgctgcaaaaggtcaacctcatacttgaacgaataatccccaaatttttgtatggtatcatccttggcgggcctagtttgactaggctgcatgcagccgacaagtgtgtcaggatggctgtaaaggagatcctgcacctccatcctagtacaacagaccatgtactatatgccagaaaaaaggatgggggaatggggattccccgactggctcaccttgtccgcctagccagtctcaggtcggggttagctctgttagcgagtggggacgttgccgttcaagcagcggggatggcaggcgacctggaaggccgctgcaagaaagtcgcaaatgatttgcggcttaattggccggtgacgctgagagatgtggtgagagccagcaataaatttaaatctcaagaatcaaaagattgggagcgtctggcctcccagggtcacggagtcaaggacttccggaatgaccgtcttgggaattgctggctctatgatccgacggtgttgtccagcagcagatacactgatgctctcaggctgaggactaacacgttcggcgtcaacgttgccctaaggagggccgacaaggaccttgaggtcaactgtcggcgatgccacgggaaacctgaaaccttagggcacgtgctcggagagtgtgtggcaggtaagggtatgaggatacaacgacacgacaagatggcggcctttgtggctacaaaatgtgaagaaaaggggtaccagacgacccgcgaacagctattctccatcgagcagggaaaactcaaacctgacctcgtcgtaatagacggggaaagggctctcattgtcgacgtaacagtccgctttgagagtgggaacgccctctcacggggagcctctgagaagatcgaaaagtatcagcctttggctgactattttgtctctcagggggctgttcgagaagccaacgtgttaccgattgttgtcggttccaggggagcaatcacccaggccacattgaagtccctagctacgctagggttagatgtggaacgtgttggcaagtacctcgccatctgtgccgttgcctccagcgttgagatcgcatgcatgcacctggattacacataatgtcccttttggcttgcccccacctgcttaaaggaactggcaggaaagagagtgatccgtgccatagaaatatggttatccggggcaagtcactagcaatatgggacttctccgggtccgtgcggtccttccaacatgagctggacgtagtccactctatgacttgaacgatacgggggcgtatctcccccggaagaggtcgcctaggcgacttagaa

SEQ ID NO: 1123 - DNA, 5021 bp, Reticulitermes lucifugus
  source 1..5021: mol_type = unassigned DNA
ctcactgctgtcatgccattgttaatgcgttgggtgatggcgggtgatgggagacgagttacagcagagctggcttcacggggggggctgtagttgcccgaaccagtctgcttctgagtgcctccacgtggcctcgctggaaacgtcggagctgcttacggctaacccgtagacaactccggcggccaaactcagaaaacggccttactaccagggtcatccctcgcggcggcgctaagaccttactgtatgtactacggactacagttgagtagcgcgggagagcacttgatgtgagggtagcaacttgttgctacttcgactgtctccctgaagatttccgaaggggtgccgcaagtccatgggggcggtcctgctgtgggagttatcttgcacccgggaagccctcagtggataaatactccaaaatggcttagccacctcacgtggagagaggggaattaggggtttactcctaagggccgatgcctccaatcggatttccccgggcaacggctattatcagccggctaagttcggaccctcatctactgatgggatactctctctccccccgcctgcgtgattagttgggaatgcacgcgggcgggtgattctgacaagcccagcccaaaagttcttaccacgacgtacccgggggtgtcacccgaactaatatattttccgccgatcggttcgctgtggggggatgtcggggcctggtggccgggaaccgtcagccgctctttgagtgtcctgcgtaacccggaggcggtgacgtcgaagggctaggctagcacggtccagacccctgaacgcctggggagacgggcccaccacctgagtaggagtgggtcctttacctcatttgaggtgtctcctcgttcttgtagggggcgaaggacgaggaatgcatccgtccctccaggatgctggtggtttccgtctggtgggctcatgctgaaacgcgcaggtgccgatttgtcgaagaggacatatggggtaacccatagaacctaggcaggagtaatcccttagctgggggggtcagctggtgggtcctgtcaatttatcctcccctccatgccagagccggtccgaggttagagacggactcattttctcctttttatatgtcatgatggccgattataataattctgttgatcatgcacttgaggataatactagattgatatttgcgcgtgacgcagtacttgcgagagtatgtggaccttttgataacttggagtgcgggttgtgtggggtgctcctgacgtcccttcagggcgttcgagagcattgccaccgggcgcaccataacttggatttgacttttcaatgtactaaatgcgataaagggttttcctcgtataggggaatttgttgtcatttttcaaagtgtataggagctcgtatatctgtttcagagggcccccttagttgttcagaatgtgaaagggaatttgactctaaaagagctctttcaacccacgagaggcatatgcacccagggattaggaatgctaagaggctcaaagattttaatccgcggggggggggtggtaaaactattcacggcaatactaagtggactgaagaggaggtccagttgcttgtatcacttagcaagagatttgaggggtataagtctatcaataaagaaattagccttattttaacatcaaaaacttgtaaacaaatttctgataaacgtcgctatttaaatttgcataatggaaatggggggctagctgcagcggaagctgtattagaattttgtgaagatagtcaccctgaagttactgagagcgatggggcggtgctttctgaaatcatggatgaggaatgtcatcagtcatcggtaactatgaggtcaagcatcgtacatggcgacattggtcgtgaggttcaagggaaggaattggtccggatcccgcctgataatagtgtaatggggaattgtgttgttctacttaggaaacttgctactgacaaaagaagtgatttggacttgagtaaggataaagagttgcgcattgacattgagaaggcgacgaaagctaacagagaaagcgcagacggtagggtaattcaatctgtggctggtaatgagatcgatcccgatacttttcaatggaaagaattgctgcttgggcaggtacgggggtttccacgagttgatgagaactctgaattatttgatttggatgacaaattgactaaggaattatcttccgacagccccgtgtggaatgacaactgcgaacttattgtgtcggacttatgtcaggtcttatgcaaaaagaaatatgagttaggtaggcagcatcacgttaggaaaggaaagaggcatcggggtatacatcataagagggagaaatttagggaatgccagaagatatttagaaagtcccccagaaagcttgccgaatatctctaccgtgataaggacctgtctcatatcagtaaagacgctagcactccgcagggtatagagcaatactattctcagttatggggggaacctgaattactagaatccaacacaattgaagaaaagttaccgtccagttccttatttgactgtcttccccccatcacgccggaggaggttgagggaagaatccataagattcgaccgtcttccgccccagggttggatggggtacgcaagatccatcttgtcggtaaagggataaccctggtccttgttaaactctacaacttgctatttttgactgggggatatcctgagtgttggaagcggaacaggaccgtctttataccgaagattgggaaagatctgagtgaggtgggaggatggagaccgttgacaattggttccctattagctcggatgtattcagccttcctagagaggaggattaggagggtgacctccttgtccttgtcgcagaggggctttacgaatatccaaggttgtcacgttaatttgactatcctcaaagaaggcattcgacaggccaaagtcaagaacgggggagttatagtctcagtagacatagagaaggcttttgacacaatccctcattctgtaattttctcccgcttggcgtctcaaggtgttcctccccttcttaggaaaattatttccaatatgtataaggatgtctacactgtgattgaggggcagtgtattccaataaagagaggagttaaacaaggggatcctctttctccactacttttcaatattgccatcgatcctgtgttgcgcagtttggaggagtttcaggggggtctcccacttggtaactcggctattaagatcttggcctttgctgatgatattatattaggagctagttcggcgggtcaggcgcagcagatggtggatatgttgggaataggacttacttcgtgtgggttgggagtatcccatagaaaatgttttggatttcaaatcgtgaataaaaacaagacctggacaattgttgacccgatgatcacactcaatggttcttcattacccttctcagggccagaggacaggttgccttatctcggggtggatataaacccatgggataggaaatcacggtatgacgctggacagagacttatttcggcggccaaacgaggctctcaactatcccttaagcctcagcaaaagataaatttaataacagcttttcttttgccaaagtttctgtacattctgattgaagatccgccttcgcctgcctatctgaaatccatcgatcatgacctgaggcagatatataagaatattttgcacctccctaactgtgtgtcaaccgcctttatgtactctcccaagagggatggtggtttggggctaccgcgtctgtcctgtctagttccacttgcccatttaaaagccgggatcaagctcggttccctccaagattctttggttagggaaattaccacctcagacaggtttgtacgtacaatgggttcggtagctcactccctttgggcatcatggtctctaacgttgcaggatatctataaacttaagtccgcactgaaacgtagggaagctaaggcatgggagagttgtgtgtctcagggacaaggagcagcgcaatttcgcggggactcaattggaaacaactggctccataatccgggaacctatcgacctggacagtatatcgaagcacttaagcttcgtgctaatttaacaggggttagagtcaacttgaagcgttcaggctataatgttccaataacttgtaggttctgtaaggatatacctgaaacgcaggctcatgttcttggactttgtccaaagaccaagggaatgagaatacaaaggcacgattcaattgtgaatagggtgcgagataaacttaagactaagtcgcccgttgctctcatgcatgagcaaaacttcaccgttgaggaaggccaggtgttcaaaccagatatagtgacgattttgggagaggtgggttacgtaattgatgtgacagtacggtatgacgatagagattacatcaaggatgcctctgtggaaaaaatcaggaaatacgaggcccttaaagggtacctgaaggatttatatccacagctgaataaggtagaggttttgcctcttgtctttggtagcagaggggccgtgccaggtagtactgttcacaacatgggattgttaggttttacgaaacgtgaaatggtccacatctctcgcaaagttatagccgactcactgataatctctaattttttagaggtttattgagttagatatatatgacgactgattcttccctaactaaaatataatttggaatgtgcattacttatactttattgtatttattgacatccgtagtagtctgtttagtggatttagatcgttaaccattctgtgacgtcgctgatgtctatatgtaccagtggcagaatgctgactaagaacaaaataattttaaacaatagacagcactaagaaattctgcaaactggaacgtggcccacggtaggccaatataccggaaagggaaaatgacacatccccccttaaa

SEQ ID NO: 1124 - DNA, 5020 bp, Reticulitermes urbis
  source 1..5020: mol_type = unassigned DNA
cacactgctgtcatgccattgttaattcgttgggtgatggcgggtgatgggagacgagttacagcagagctggcttcacgggggggctgtagtggcccgaaccagtctgcttctgagtgcccccaagtggcctcgctggaaacgtcggagctgcttacggttaacccgtagacaactccggcggccaaactcagaaaacggccttactaccagggccatcccttgcggttgcgctaagaccttactgtatgtactacggactacagttgagtagcgcgggagagcactcgatgtgagggtagcaacttgttgcttcttcgactgtctccctgaagagttccgaagaggtgccgcaagtccatgggggcgacccggctgtgggagttatcctgcacccgggaagccctcagtggataaatactccaaaatggcttagccacctcacgtggagagaggggaattaggggtttactcctaagggccgatgcctccaatcggatttcccagggcaacggctattatcagccggctaagttcggaccctcatctaccgatgggatactctctctccccccgcctgcgtgattaattgggaatgcacgagggcgggtgattctgacaagcccagcccaaaagttcttaccacgacgtacccgggggtgtcacccgaactaatatattttccaccgatcggttcgctgtggggggatgtcggggcctggtggccaggaaccgtcagccgctctttgagtgtcctgcgtaacccggaggcggtgacgtcgaagggctaggctagcacggtccagacccctgaacgcctggggagacgggcccaccacctgtgtaggagtgggtcctttacctcatttgaggtgtctcctcggtctagtagggggcgaaggacgagggatgcatccgtccctccaggatgctggtggtttccgtctggtgggctcatgctgaaacccgcaggtgccgatttgtcgaagaggacatatggggtaacccatagaacctaggcaggagtaatcccttagctgggggggtcagctggtgggtcctgtcaatttatcctcccctccatgccagagccggtccgaggttagagacggactcattttctcctttttatatgtcatgatggccgattataataattctgttgatcatgcacttgaggatgatactagatttatatttgcgcgtgattcagtacttgcgagagtatgtggacatttcgataacttgaagtgtgagttatgtggagtgctccttacgtcccttcagggcgttcgggagcattgccaccggtcgcaccataacttggatttgacttttcaatgtactaaatgcgataaagggttttcctcgtataggggaatttgttgtcatttttcgaagtgtagaggagctcgtatatctgtttcagagggcccccttagttgttcagaatgtgagaggaaatttgactctaaaagagctctttcaacccacgagaggcatatgcacccagggattaggaatgctaagaggctcaaagattttaatccgcgggggggtggtaaaactattcacggcaatactaagtggaccgaagaggaggtccaattgcttgtatcacttagcaagagatttgaagggtataagtctatcaataaagaaattagccttattttaacatcaaaaacttgtaaacaaatttctgataaacgtcgctatttaaatttgcataatggaaatggggggctagcggcagcggaagctgtattagtattttgtgatgatagtcaccttgaagttactgacagcgatggggcggtgctttctgaaatcatggatgaggaatattatcagtcatcgctaactatgaggtcaagcatcgtacatggcgacattggtcgtgaggttcaagggaaggatttggtccggatcccgcctgataatagtgtaatggggaattgtgttgttctacttagaaaacttgctactgaaaaaagaagtgatttggacttgagtaaggataaagagttgcgcattgacattgagaaggcgacgaaagctaacagagaaagcgcagatggtagggtaattcaatctgtggctgataatgagatcgatcccgatacttttcaatggaaagaattgcttcttgggcaggtacgggggtttccacgagttgatgagaactctgaattatttgatttggatgacaaattgactagtgaattatcttccgacagccccgtgtggaatgacaactgcgaacttattgtgtcggacttatgtcacgtcttatgcaaaaataaatatgagttaggtaggcagcatcacgttaggaaaggaaagaggcatcggggtatacatcataagagggagaaatttagggaatgccagaagatatttagaaagtcccccagaaagcttgccgaatatctctaccgcgataaggacctgtctcatatcagtaaagacgttagcactccgcagggtatagagcaatactattctcagttatgggggaaacctgaattactagaatccaacacaactgaagaaatgttaccttccagttccttatttgactgtcttcctcccatcacgccggaggaggttgaggggagaatccataagattcgaccgtcttccgccccagggttggatggggtaggcaagatccatcttgtcggtaaagggataaccctggtccttgctaaactctacaacttgctatttttgactgggggatatcctgagtgttggaagcggaacaggaccgtcttcataccgaagatcgggaaagatctgagtgaggtgggaggatggagaccgctgacaattggctccctattagctcggatgtattcagccttcctagagaggaggattagaagggtgacttccttgtcctcgtcacagaggggctttacgaatattcaaggttgtcacgttaatttgactatcctcaaagaaggcattcgacaggccaaagttaagaacgggggagttatagtttcagtagacatagagaaggcttttgacacaatcccccattctgtaattttttcccgcttggcgtctcaaggtgttcctccccttcttaggaaaattatttccaatatgtataaggatgtttacaccgtgattgagggacagtgtattccaataaagagaggagttaaacaaggggatcctctttttccactacttttcaatattgccatcgatcctgtgttgcgcagtttggaggagtttcaggggggtctcccacttggtaactcggctattaagatcttggcctttgatgatgatattatattaggagctagttcggcgggtcaggcgcagcagatggtggatatgttgggaataggacttacttcgtgtgggttgggagtatcccatagaaaatgttttggatttcaaatcgtgaataaaaacaagacctgggcaattgttgacccaatgatcacactcaatggttcttcattacccttctcagggccagaagacaggctgccttatctcggggtggatacaaacccatgggataggaaatcacggtatgacgctggacagagacttatttcggctgccaaacgaggctctcaactatcccttaagcctcagcaaaagataaatttaataacaacttttcttttgccgaagtttttgtacattctgattgaagatccgccttcgcctgcctatctgaaatccatcgatcatgacctgaggcagatatataagaatattttgcacctccctaactgcgtgtcaaccgcctttatgtactctcccaagagggatggtggcttggggctaccgcgtctgtcctgtcttgttcctcttgcccatataaaagccgggatcaagcttggttccctccaagattctttggttagggaaattaccacctcagacaggtttgtacgtacgatgggttcggtatctcactccattggggcatcatggcctctaacgttgcaggatatctataaacttaagtccgcactgaaacgtagggaagctaaggcatgggagagttgtgtgtctcagggacaaggagcagcgcaatttcgaggggactcaattggaaacaactggctccataatccgggaacctttcgacctggacagtatatcgaagcacttaagcttcgtgctaattcaacaggggttagagtcaacttgaagcgttcaggctataatgttccaataacttgtaggttctgtaaggatatacctgaaacgcaggctcatgttcttggactttgtccaaagaccaagggaatgagaatactaaggcacgactcaattgtgaatagggtgcgagataaacttaagactaagtcgcccgttgctctcatgcatgagcaaaatttcactgttgaggaaggccaggtgttcaaaccagatatagtgacgattttgggagaggtgggttacgtaattgatgtgacggtacggtatgaagatagagattacatcaaggatgcctctgtggaaaaaatcaggaaatacgaggcccttaaagggtacttgaaggatctgtatccacagctgaataaggtagaggtattgcctcttgtctttggtagcagaggggccgtgccaggtagtactgttcacaacatgggattgttaggttttacgaaacgtgaaatggtccacatctctcgcaaagttattaccgactcactgataataatctctaattttttagaggtttattgagttagatatatataacgactgattcttccctaactaaaatataatttggaatgtgcattacttatactttattgtatttattgacatccgtagtagtctgtttagtggatttagatcgttaaccattctgtgacgtcgctgatgtctacatgtaccagtggcagaatgctgactaagaacaaaataattttaaacaatagacagcactaagaaattctgcaaactggaacgtggcccacggtaggccaatataccggaaagggaaaatgacaaatccccccttaaa

SEQ ID NO: 1125 - DNA, 4718 bp, Rhynchosciara americana
  source 1..4718: mol_type = unassigned DNA
cagaacgtggagaaacggaataactacccagatccgttggttaaccggtggcaaagttaatcaaggttgccataggcttaataaccctatggaaatgtttccacacacctccacgtggtgcctgccggaaattgttctagggtgaacaagctaagttgtgagaaacgggctccaccacaatatggagcctgccagggcgcgagactcaggactctccatgtacaaagtggttagttgcaaaaagagtgcgcctagcatgactgataatttttcactgaaataacgttgaactttatctgtgtcatgtgcacaacactatggtgtctgatcaagcaccatcagtggtggacctgctaatgtattagtagaacgtgtccaggcgataatgcacacacggcctccgggcccatcgctttttttgagattccctagaaacttcagtgtgtgcgacaactgtataacccataagggatggacaaaggttatactagggggtaaaaaccctaatcggctaatggcaaatgggatgtagaaatgccaaagattactcgcaccgaataatggtggccgaaaagcgggtaatcgaatgaaatggtaatgctgtagcggaaacatgatcacattctgtgacagtaaaccattagacctagggggaactatgattaacaagataccagcttacatggaagcaatgaaatgtaagtcacagtagtgataagtggtgaagagtcttgtaatcaccgtaactaggccaggttctggggatgccatgaacttagggggagtatggttagcagatctaccagctaacactattactgataatatgtaagccgcagtagcgctaagtggtgtacagatttgcaaccaccgtaactaagttctgtttcgatggactagggggaatcatgattaacaagataccaacttacatggaagttatgaaatgtaagtcacagtagtgataagtggtgaagagtcttgtaatcaccgtaactaggccagatgtagtcaaagcacatgtttagggggaacaaggttaacattggtaaaagaccaatgcaacctccgtaactaaacgtgaaggcacaaaactaaaagtccagtggatgacaggtgaggtcatcactggacccaaatgttttaagctcatcataacaacacggtgaaaaatccagcatttatttgcctgattgagtagcttccacactattccaaagccgaacctatctgggtttttcttgaaaggccgtatagggcatatgtcgagaaataagtccaaggtgaggtagtgtggccctgtacccaggggtaaggtactatacggtcgagtggctcagtaggcctaactagccactgagtcactataatgactagttatgagcaactacaatgaaacaaacacgagtggtggggataaccctcggatggccactcaaaccactggatcgctatccagtggaccaattaaccagcacacatgtgaactatgttgtaggacatttggtacacgtgccggattgggacaacatgtgagaaaaacccatccaattgagtccaaccaaagcattaatgtagaacgaaagaaaagaagatggtcacctgaagagataagacgtatggcgaatatggaagcccaagctaccataaacaacatcaaacacttaactcaataccttgcaacttaccttcctcaaagaactttgaacgctattaaaggaaggagaagagatgctgagtataaagaactggtgaccggcattatagcaaatcttcggagtaattccagtacacaacaaaccaatcaggtctgtaatgaaagtgaaatgtcacaacgcagtaagatactgcaaagtatacgagaaagcgtacgtgacttgagaagtagacgtaataaatatgcgaaagcattacaagagcttggggaagcagcattgtgcggtaaaatgttgaacgaagaacagctaatacattgtataaagtcaatgttcaacaccgctaagtgtccgaaaggaccaagatttcgcaaaactgcaacccacagtggaacaaataagcaacaacggcaacaacgatatgctagggtgcagaagttgtacaaaatgaaccgaaaggttgccgcaaaaatggtgttagaagaaacggataagatacagataaagttaccggaccatgatccgatgttcaagttttgggaaagtgaatttaaggagggcgaaggcatgccggaaaggatgcccaaggatctgaaggaatcgcccgacttaaaagcgatatgggatccggtaactgaagaggaagttagaaaggcaaaagtggcgaataacaccgcggcaggtcctgatggaattcagccgaaatcatggaacaggataagtttaaaatataagacgttaatatacaacttactcctgtactatgaaaaagttccacataagcttaaggtgtcacgaactgtgtttattcctaagaaaaaagatggatccagtgatcctggtgaattccgacctcttacaatatgttcagtggtccttagaggtttcaataagatccttgtgcagaggcttgtatccctatataaatatgatgaaaggcaaacagcttatttgcctatagatggtgtgggcacgaacatacacgtgcttgcggcgatactcaatgactcgaacacaaaactgagtgaactgcatgtagcgctattggacattacgaaagcattcaatcgcctacatcacacatcgataatcaaatccttagtgggaaaggggttcccttatggatttattactttcatcagaagaatgtatacgggcttacaaacgatgatgcaatttgagggccactgcaaaatgacacaagtgaacagaggagtctaccaaggagaccctttaagcgggccaatctttttgttggctattgaaaaaggcttacaagctcttgataaggaagttggctatgacataggggatgtgagagtcaatgcaggtgcttacgcagatgatacagacttggttgcaggaacgagacttggcttgcaagacaacataaacaggttttcaagtactattaaacaggttggacttgaggtaaatccaagaaagtcaatgacattgtctctggtaccttcggggaaagagaagaaaatgaaagtagaaactggcaaacctttcagagcgaacgatgttcctctgaaggaactgtcaattaatgatttttggagatacctgggcataagctatacgaatgaagggcctgaaagactgagtcttacaatagagcaagatctagaacgcctaactaaagctccattaaagccacaacaacggatacatatgcttaacgcatatgtaatacctaaatatcaagacaaacttgtcttgagtaaaaccacggcaaaagggctgaagcgaacagataggcagataaggcaatatgtaagacgatggctaaagttaccacatgatgttccaattgcatatttgcatgcaccagttaaatctggtggcctaaacattccatgcttgcaatactggataccattacttagagtaaacagagtcaataagattacagaaagtcaacgcagtgtacttgcagcggttggtaaaacagccctgctaacgtcaactgtttataaatgtaatcagtctctagcaacattgggtggaaacccaacaatgcttgcatatcgaacgtattgggaaaaagagctatatgcaaaggtcgatgggaaagacctacaaaatgcgcgggatgataaggcttcgacgaggtggaatggcatgttgcatagtgacattagtggagaagactatttgaattatcataagcttcgaacaaatagtgtacccactaaagtaagaacggcaagaggacgtcctcaaaaggaaacgtcttgcagaggtggttgtaaaagcacggaaacgctgcaacatgtagttcagcagtgtcatagaacacatgggggaagaactctaagacatgacaggattgtgggtcttctccaacatgaactacgccgagactataatgtcttagctaaacaagaactaaaaacgggcatagggttgcgcaaaccggatttagttcttataaaagatgacactgcacacatcgttgacgtgcaagtcgcaaggtgtagtaaactgaatgaaagccatgtaaggaagcgatccaaatacgacaagaaagaaatagaggtagaagtaaaaagtagatatcgtgtaagtaaggtgatgtatgaagcttgcacgatatcatacaaaggtatttgggataagcagagcgtgatgagcatgagaagacttggagtaagtgaatactgtcttttcaagattgtcacatcaacactaagaggaacatggctttgttggaaacggttcaatatgatcactagtgttcgatcatagaaatgtgtgcgataaggtgtgaatagaagggttcaccaagagggagacctagtttggacctcagaaatggggtcataggagtgataggttgtaaagccgttggggaatccggctacacatggtatctcaggagccattcatgcgctgatctcattaaggcgtaataaactgtgaaacagatcctgataatgccgtgctaccaaatgatgtaacgaggcggaaataaaattaatctggggcgttctgcggaatgactactaaatatagcgatgctatatatacaaacgactgatggtaacaccggcctta

SEQ ID NO: 1126 - DNA, 6550 bp, Ciona savignyi
  source 1..6550: mol_type = unassigned DNA
  misc_difference 3376: note = a, c, t, g, unknown or other
  misc_difference 3727: note = a, c, t, g, unknown or other
  misc_difference 4401: note = a, c, t, g, unknown or other
  misc_difference 6423: note = a, c, t, g, unknown or other
  misc_difference 6525: note = a, c, t, g, unknown or other
ccaaaattacttccagcacctccacagcagacgaacgaagaaagaagacttacgaaataagaataagcagtttaaagacgaagcagacgaacaccactccaccaacgacgctctgcagctacaccaccaccatctcgccgcaacaagaagaattttccgctgctctccactctgctccaacaccacctctcctgctctgtggactgctgccttgctgctggaccaacctctacccgaaggaacccttcgaacccagcagcaaggtacgtgtcaccacctctccacagagccaaggccagagtggatagagcagcggcctctacaaccaagttctccactccgacgacaaaacacctgcctcgtggccagagtcctgccgaagaagaatcttcgaccccaacaccgtctcggcagggctccaagcaacgacatcagccacgagtgcccaccggagtggacgcggcgaacccgaggaccgctgtcgccaagaacaataacatcaccgcctgcagcagctaccaaacaaaggttagtctcctacctcacctacaaactcgtctgaatagacgcccccgcgtgggagctaaccttggtagctagctgcagtgccctgcgacagcggcctcgaagagctgcagagcgtcagcctgcttcgacctcgcttgttctcatttcaacctactccgtcctgtggaatcaaaagagccccactaacaattacattcataaaatctagcaagaacgaagagaagcgaccaacttttaatccataacttttagatctttttatttattactgtttttaagccctaagcatattgcctttttttagatcttataattataaaaatagattcaaagttaacaccaccaggccgctacagagcattttatttaatcaatttgttaccgacctcctgctgcttctttttactttctccagactactacccggatacaacccttggaaacgagaggaatggccggtcacaagatcacaatgtcggaggggaagctgctggaggttgctgtacggtatggtggtgtgaggaatgtctcgtacgagtgtccagtcccggattgcacaaaaaccttctcacaggcaaataacttgatacggcatttaaataactttggcaatacaaaacaccgagcacacaatttcacctattttttcacctgtgagaagtgcaaaatccaaattcacagcaacacaaaacataatatttcaaatcattacaaacagtgttgtgcaaccggcggcggaccctcgtgcgagacgggtcaatacttctgccctgcctgcgagcaagcagggctggggaacctggagtcggcactccgccattttcaatcctcccaccctgaatttaatctacccccccggtctcaattttcaaaatctcatcccaatagttataccctatccttaaaacctaaagaccaccttatgaaaatactttacagtggaccactgactccggggcaattggtatgccccattaagatctgtctcaggtcctcagctgcacgtcttttccatgacgtgtccaagctgaggaagcacatgttggttgatcacaaccgaacccttgtgtacgagacaacatgtggcaaatgcttgcggcctgtcgacacctcgaaaaatatgcggaaaacgacgtcgcacttcgaaaagtgttctggcgaatcctttatctcatccccctcacccataccccaaaagacttataaactcgacttaccctcaaccagcacccctcccccccgtaaatctcccaaattacaaccctacaaaccaattcgaacctttaagaaccccctcaccaagtccagtcaatccaaatccgacaacccacccaaacctaccccttttttctcgccaagaacacttgagaggtcggcgtcgtggcccgcattgagcgaggttgtcgacccactgcccaagctcaaggaaaaacacccctcgctgccatgcgccctggataagtgcccaccctcaccccggatcaaaccctcgaccctagtccctccctgccatacagcaaacaatagtcccaaaccaacttcacccgaatcaccctctaccctaaaacccttaccccgccccatccgaccatctaaacccttggaggattggttaactgtgcggagcgtgggaccggatcgggagatcgtcctgaacatcggtccgagaccccgacccggccccgcagcaggctccaggacaacatctcccccgtcaacggcacccgcgaaaagggttgctgcaaacccaatcgcagcacccttgagcggggagccgggtgcgacccttgattgcggccagaccgggcgaaaggttcagccgccaaaaaagagaccgacagagagtgctgggtccctccctcctccggccgagccagccaccgatctccttacagggagagaggggctggcgaggctggttgaggaatatcatctgtcgggggactttggcgctttctgtcgggatctcgagcgatggacggcgctttcgtcgaccaaccgaaggccaaagccgaggcgcggcaggtacaaccgcggtgcggctgcccgtgccaccaggaaccggggccgagatgatcgtcaagatccacaagatcgagacgatcaaggaggccccggtccggtgacatgcgggcggccgcaaagatacaagcgggccgccgcgctgaggtcggccttcgggagggacatgaaggcgaccgtccgtcgcatcatagacggagaacggggcgacgctcgctgtgaaatcgaccccaaaaccatcgagggtcgatttcgcgacgagctgtcgccgccggttcgggaagggccggagtgctcgttgcccccttggatggctgaagcccaggcaggtgagcatgcgccatcgaatgatagccaacccggcgatgcatacgatgggccaatcacggcgctggaggtggagatggtcctcagtaccctgaacgtcggctctgccccgggatcggacggcctctcctatggattttggagagctctagacccgaaaggactcgtcctttcggagctcttcgaagtctgtaggatcgagcgccgggtcccggggccatggaagagcagccgggtcaccctcatctgcaaagatgcagagggtgacctcgacgatttggggaactggcggcccatctccatctgccagacggtgtataagatctacgccgccgtgttggcccgtcgactgcagagctgggcgcttgacggtggcgtcatctcccgaagtcaaaagggcttcatgccgttcgagggggtatacgagcatgtattcctcctcgactcggtcgtcgctgacgcgcgcgcgacccggaggtcgctggccgtgtgctggctngacctccggaacgcgttcggcagcgtcgaccacaccaccatagtcgaggcgttgtctcgcttcggcgcccccgcgggcctcgtggagatgatatcggacatctatacgggtgggtcctgccgaattagaactcgtgcgggattcaccccggacatccctgtcggtcgtggagtgcgacaggggtgtcccttgtccggtatcatcttcaacctcgtgatggaggtcctgctgcggggcgtcgaagcgaacaacgcttgtggataccggctctcctgcgccggcggcgcgtccgtcagggtgctcgcgtacgccgacgatgtggctctggtgggctcttccagggccgagatnaagatccagctgggtgtgtgcgagcggtttgccgcctgggccggtttttcttttaacaacaagaagtgcgccgccatggtactgaaacatcagagagggggtcggaggctcttggactcggcgcctcttcgcctttgcggtgaagaggtggcgatcctgggccccgactccttctacaagtacctgggggcgcataccggctacgggcggcaaacgggtggacagcttgtcgatcgagtcgaaaggcaggtcgtcaggctgttcacctcgttcctcacccccacccaaaaactctcggccctgaagagaatagtcctgcccgccatgagcttccatctccgggtccggccctgcgccgaggggcatctccggcgccttgacaacacagtgaggcgctgtgtgaagacagcgttgcgcctgccgaaggggtcgtgtcgggcttttttccacacgtcccccgacgcagggggcctggggatcacgtcggttgtcgccgagtgcgacatactgacggtgacccaggccttcaagatgctgtcttcaccggaccatctcgtctcgctagttgccaagggccgtctggggatgcacgccgcgcgcatgggccggtccgagacggcgtccgcttgcgccatggcggactacctgagcggggactcggtaatggggcacangtcgtggaaaaccggatacaggatgccggccgatctctggacagccactcgagctgccagccggcgcctgtccctccggttttccccgcagccccaaggcgaattcggcctcgagtcgggcactttcaagatcgcccccagggagcggcgctccttgacccgaaggctgcaccacaggcaaaacctgtggtggcggaaccagtgggcggcccttcccaaccaagggaagaccgtcgccgcccactccgcctacgcagcctccaacaactgggtcaagggcccgtcctccctggcccctcaggccctgttcttcggccttaaagcgcggctgaaccagatgccaacgcgctcggtcaaggcctgctactcaagggcgccgaactacgacaagtcctgtcgtaggtgtggcgcggaggtggagaccctcccgcacgtgctgaatcattgccccaagtccatgaaatcgatcttggagcggcatgattcggtgcttgcggaggtcctcgccgccatccctcgcggcacattcgccagtgtcgacgtcgacaggacgtcccgagaacatttccggcgagtgggcgaagctctgcgacccgacatagtcgcccgtcgacatgacggatccgtcgtggtcgcagacgtgacgtgcccattcgagtcctgcgcgtcggccctcgatacggcggccgcgcgaaaaatcgaaaaatacgaccagctgtgtgcgaacttgcggcagttataccgtaagcccgtcgagtcgcacgcactggtcgtaggttccttgggcagctggggcaggaccaacaacactgctctggctgcactcggaatccgaggcgcggttcgctcgaggttggccaagcaattggtcaacctcagcgtcgagggtagccacaacatctggctacgctggtccggcggcatcccaaaggacctggtcagataagatccgcggctgtggcgccgaacgagcacctgcccattcttcttgtagggactttttcaccctcactccccccaatagttttttttcgttttttcgttttttcacccccaccccactcgcctctgggctgcacatcccacacgtagggacctgtttatattatttgccttttatatgtaccactttttaaatatatttttgtaccccacaagatgcttttcgccaaaaaaaaaaaatttttgtatcacatttttatattttgtaaaacacagatttttataaactttgcactatttttatataaacttcgcacttatttaaaatgaatcgcatcttttttatatacaccaacacaaacaggatgtgcagctcaggggaaccaatcctgcgtccctcctagcggcgggaggggcgcccacctacccccacgctcctcttgagcaccaacagggactcccttccggagcccctgcaccctcaacttttcttatttttaaaaaaaaaaaatcatatatattgatcttgacgacgggggctacattcagcccccaaaaacccacccaccatccccaacgagtgccggggcattgaagagctccggcacaattagcacttagcttatttattattttttgtcaacatttttgttttttcaaattttttcacccctcacccccaccctaataggtccctcgggcttgggcccctttttcgtgctcgagaagcgtcacatcgccccactgaccacgaccttccccgacattggagtccttggcgtctcccaggtcgaaacagtcccaagtgatagcacctaatgctcgacttgtttcggcctgggccgccgaggattcccagaacgaccattcttctaaataatatttatatttcagaataaaactatatatatatcgttggcgggacttgtcccgcctcgataccgagtgctgcagagcggcaaaataaagaagaaaccgacgtcgctctgcagccaaggaccacccaaactcaagccagcaccgtcgacaaccaacatcctcaagtcggcggttgctggaacaactcataacatcttcaanataaattatcaccctgtgcagcaggaggccgtgcttttaaaactactctgtagtggctcatgataatatttcgctccttttttgccccgtgtaaacttagtngatgcgaataaaatcagttgaatca

SEQ ID NO: 1127 - DNA, 4134 bp, Bombyx mori
  source 1..4134: mol_type = unassigned DNA
gctagctccctaaaatcctaccttacgtccgaggcgaacatctgtccacgtggggagcggaaacgcgtactatcgaaacttacgcggctaacaaggtaaaggtaacccattaatatggagacaagactaaaaagaaaattgagagggccgcttcccgggggcgatcgccggggcacacctggagctggcgctgggtgttccagcataggatccgtcagcggcggagagttgagcaggcgggctctcgccggggatttacaacccgaaaatgctacagccgccaacagaaatcacgatgtagaaagtaggagcaatagcccatgtgaaccttacagcccgagtaccggttcatacaacccctcggtacaatcatcaccatcatcctcgggtcatagaggctcaccaacgtcgactatggatgttgcgcagggggcgaatctttttacctgcgtccaccaaagctggcaaaacaaggggccgcatgaaatggagcagagaagtaaacctatttatcatgcgcacctactactacgtcactaaattagaaactgatctgactatttacagaaaaaagctgcatgaacatttttcactaaaataccctaatgtaataatttcacagcaaagaatatctgaccaaaaaagggcaatagaaagaaataaactactatctcaagaaaccctagaccgactaaaagaggaagtgagaaaacagctcgaagacgaacaaaccaataatgttgaaaatgaaaaattaaattcagaaacatattcacacgaatatacgacacttactccacaaactattttaacgaagaaaacacagcaacatacaaatattatctctagcacacagacctctcattcatccactcaaaccgaatcaataactctgctgttagaaaatgaagtcgatattttaaatactaaccccacagaaggggcaacacagacacaagaagttaaagataaatttgaaacgaatttaacaatgtactcaggcatggaccctaaagcaaggccgccattgcctaaacttaaatatagctctaagctaaatgaactgatacgtctatttaataatgacatacttgtagattacatctcaccagacacacaactatcagatgtacatacattaacatattgcaccgccgtaactatttcggaacaactaaaatataaaattatagcaatagaaggaaacgcgagacataaaaaaaacttcaaaccaccgtggcaacaaagattggagaaggatatagcaaaattgagagcagatattggtaaactgacccaatacataaataataatagatctaaaaaagtagtccaaagcgttgaacaaatatttaaaaacactaaaatacacacatcacacgaaaatggcaataaaaaatctcaagaatttttagacacactgaaacaaaaattagctctaaaagcccacagactaaaaagatataacaactcacagaaacgaaagaatgagaacactatatttctaacaaatgaaaaactattctacagaaacctaataaagccgaaaactgatcgagacaatagtaatatagatataccaacagcagaacaattggaaatgtattgggctaggttatgggaaaatagtgcaaaacataatgacaaagcaaattggattactgaagaaaaagaaagatgggatacaatagaagaaatgcaatttgatgacgtgacagaggaagaaataactactataacagctagactacataactggaaatccccaggtatagataaaatccataatttttggtttaaaaaactaatttgcttacacaaaacaatagccaaaaatctaacagatattatctctggaaatcaaagtattcccgaattcatagcgacaggaatcacttatatgataccaaaaggtgacttctctatagaagcatcccaatatcgaccaattacatgccttccgactatttacaaaattttaacaacagttattacaaagaaaataaattcacatatagaacacaataatatcttagctgaagaacagaaagggtgtagacgaggccacatgggctgcaaggaacagctaattatagactcaaccatcatgaaacacgccaccacaaaaaatagaaatttacactgtacatatattgactacaaaaaagcttttgatagcatcccacattcatggctgatccaagtcctagaaatctacaaaattaaccctataataataagcttcctacgcaatatcatgacacattggcaaaccacacttaaattaaaaaaccctcctaattttgtaacaacacgacaaatagccataaaaaagggtatttaccaaggtgattctctcagccctttgtggttttgcctcgccttgaacccactatcccatcaattgcataatgaccgggcgggataccgcattaaacaacaagataacaccgaaacaataatatcacacctgatttatatggacgacattaaattatacgcaaaaaatgacaaagaaatgaaaaagttaatagatactaccacgatattcagcaacgacatcagtatgcaatttggacttgataaatgtaaaaccgtacatataataaaaggaaaagtccaacccggtgattatacaatagatgacacaaacacaataacggcgatggaaccaagtgacctttataaatatctgggctttcagcagctcaaaggactcgatcatataacaataaagcaatcattaacttcagagtacaaaaaacgtatcaatgccatttgcaaaacgaaattatctggaaaacatcttataaaagcactgaacacctatgcaatacccattctaacctactcatttggaataataaaatggagcaaaactgacatagaacaaatagaacgcataacaaggactacattaacaaaacacaataatcttcatccaaaatctgcaatagaaagattgacaattaaaagacaagacgggggtagaggcatgatagatatttggcatctatggcgtaaacaaatacacagcttaaaaacatttttctacataaaatcagatttaagtgaaattcacagagccatagcacaaaatgataacaactacacaccgctaaatctcaaacaaaaagaactaatagataatacagaaaacctaagaaatagaaacccacaaaaagacatggaagaaaactggaagaaaaaagcgctacatggacgacaccctcatgacctaagccaatctcacatagacagcaaggcatcaaacatgtggctcaaaacaggaagtctgttccccgaaacggaaggatttttaattgccatacaggaccaagtaataaacacaaaaaattacagaaaatatattattaaagatcccactattagagacgataaatgccgcaaatgcaacacccagccagaaaccatacagcacataactggagcatgttcaacccttacacagacagattacactcacagacacaaccaacttgctaatattatccatcaacaactggctctcaaacataaattgatacaaaatacaaacacaccgtactacaattataaaccacaaaccgttcttgaaaatgactcctgtaaactttattatgatcgcgctattcttaccgataggacgattcactacaatagaccggatatcactttacaagataaaaacaataaagtcacctacattattgacattgcagtcccgaatacccacaacattcaaaaaacgtttacagaaaagatgacaaaatacacagaacttaaagaagaaatagttagaatttggaaacagaaaaaagcatacatagtcccaataataatctcaaccactggagttgtcccaaaccacatccacaacagcttaaagcttctagatttaaaagataacatatttatttcactacaaaaggcagctatcctaaatacatgcagaatagtgagaaagttcatgcagcttgaagaaaaccaaacttactacacgcaataaaaactagcataattattaactcataactaatgtatattacttggccaaaagcccgtatatacagttccaccggctctgtcgacagactgaactgagaaaggggaaacatatggaaataataataa

SEQ ID NO: 1128 - DNA, 3848 bp, Anopheles gambiae
  source 1..3848: mol_type = unassigned DNA
gaaggctaaccacaataatggagacacgatctatgagaaaaaggaccacacgattgcccgaggagggagcccctactggagctgggcctgggacgggagacagagcaagcatccagcggctggaagatgaaatggtgcaagagcgttctttcagtcaacgggctctgcccgtaccacgaacgcaaaacagaaacggcagccctataaatcaccaaggcaatgctgcatctgctaatgttgctgtggctgatagacaacagtcactcattttggcaggaggccgacggcagaggattatgtggacgagagagatgaaccattacgtgatccgttgctactatgtttacacgaggatggagacggacatgcccggcagagtgaagatgctgggtatgttcaatgaccgtttccctcggtttgcgcatcagcttgacctgagcaagttgtatatacggcagcgagctattattttgcctgaggaactggagttcatcaagctggaggtgcggagggaatttggagaggaagaggcaggctggcgcgagtcgagtaggatttctgctaggcttaatacaatagaccaaaatacatcaagggcgagtgaggatcgtgatttggatgaacccaccgctccaggattgtcagtggatatccaacaccagatggccacagctgttacgcagttccatgggacagaccccttgtctcgtcaccgactaccaaaactgcattattcttaccgcctgaaaacagcagtaagcatcataaaccaagatgttctacctcagtatttggatagcgtagggagcattgaggatctgcagttaattgtgtattcggctgcggtggctgttgtacgaacgctatggttgcggacctatccgcaaggagacagcgaaggtcgaccatgctccaaggctgaaaagcccgcctggatgcgacgtctagaaaaccggatcaacgcaacacggacaaagattggtcgaatgcaggaatatcaacggggaaattcatctatgaaggtggtacgtcagattgctgaaatggttaaacctaaagaactacgagacctcactgatgccaacataacggaggtactcgacatccatttacaacggttgagtgcccttgcaaaacgattacgacgttatgctgaatgctcgaagcggaaagaacaaaatcgaatgttcaacattaacgagagagaattttacaactggatccgaaatgataagcccaattttagagaagggctcccggatattggcgactttacacagttttgggccaatctatgtgagaaacctgtccaacacaacagcgaaggaatgaggttagcagaagatgagcgcttcagtgatggtatcgaagacatgcccgtgctagttgtgaatgctcaagacatacgtgaggcaacgcagtacaccaggaatggagctgcaccaggacccgattttgtatacaatttttggtataaaaagctaatcacaatccatgagcagatagcggcatgcttcaatacggtgttggaagattcgagaaaactaccaaaatttatcaccgggggagttacttactttctaccaaaagatcaaaacacaaaaaatcctgcgaagtatagaccacttacctgtctttctaacttaaacaaagtgctgtcgtcagtgataacgcagaaagtgaaagatcattgcgataccaacaacgtaatgaccgaagaacagacaggacgtcgaaaaaacacgcaaggctgtaaagaccaggtcattattgatgcagtcattgttggtcaagcagccaagaaacaaagaaatctggatatggcatacatcgattacaagaaggcgtatgattcagtaccccattcataccttcttaaggtactccagttgtacaaagtagacgggaatgtcatcaagctgatgcagcacgcgatgggtatgtggagtacatctctacacgttaccgacggaaaagttgtactacggtcaagatcactcaatatcaggaggggtattttccaaggtgacacctttagtacgctgtggttttgtctagctatgaacccgcttagcagaacactcaaccagcaatgcaactttgggtatttactcaaaagtgaagaaataagcacgagaatcacccacaccttctttatggatgacttgaagctgttcgcagaaacagtacagaagatgcaccacctgttgaagaacgtgcagggattcagcaacgacattaaaatggaatttggtatcggtaaatgtcgatcaattcatctacaccgaggtcaagtattggatgccgatagcttccgtgccaacgaacaagaggaaatccgccacatggttcaaggtgaaacttacaagttcctcggtttcctgcagctgaggggtattcactatgcagtgatcaagaaagagctacaggacaagttcttacatcgtgttagctgtatcctgaagagctttttgtcagtcggcaacaaggtgaaagcaataaacacatttgcggtggctctgttgacctacagctttggagtaatgaaatggtctaatactgacttggaagcgttggagcgaacaattcgtgtggtttccactaagcaccaaatgcgtcacccaaaagcgtccgtcgagagagtaatcctgccacgaaaaataggaggggtaggaatcattgatattcaggcactttgtatttctcagatccatcagctgcgaagttacttcgtggaaagccaaaaccgacatgaattataccgcactgtgtataaagcagatcacggattaagcgccctgcatctagcgcagcaagattaccagctgaattgcaacataaaaaccgtcgatggaaaaggcgcaacgtggaaacagaaggagttacatgggacgcacacccatcaactgaatctggaacatatcgacaaagtgtcatctagcacttggcttgtgaggtgtgaccttttctgtgagacagaaggtttcatggtagccatccaagaccgggtaattgcgacgtggaactatcggcggtgtatattgcgtgaagacgtggaggaccgatgcagaaagtgcaactcaggaggagaatcgattgagcatgtcattgccggctgtccagtgctagctgggtcagcgtatctcgatcgccacaacgacgttgccaaaattgttcaccagcagcttgcactgaggcacaagttggtagagcgatttttaccctgctaccgatacctcccagatccggtccaggaaaatgattgcataaagctgtattgggatcgcgaaattataacggacatcctcatccgtgccaataggccagacatcttagtctacgagaaaagaaagaaacgagcgaccatcgacatcgacattgctgtaacgttagaccataatgttcagacaacattttccaccaaggtgatgaagtatcatgatctggcagaggagttgaagcagacgtggtatctggaggatatccgcattgttccggtaatcatctcggcgaccggaattgtacctatggccctcttacgttccctggacgagctcgaactgcagagagaactacccaggattcagaaggcggtgattcttcgaacatgtagcactttaagaaggttcctgaatccctataactaacatccggtgcaaactcattaacattaagaaaagagagaggagaaatgagaatgagattcattcacctttggcatttgaatagcccggggtaggtgaaaagttcccagcatattgctgagaagtgacaaaattcggataataataataataataataataataataataataataataataataataatatgcataataata

SEQ ID NO: 1129 - DNA, 4856 bp, Bursaphelenchus xylophilus
  source 1..4856: mol_type = unassigned DNA
gggatcctgggttcctactacctcgctccacctcctcgcgatggatcctggggaagtctccggactgagctaagagagcgttaaagtagagggtgacggcgtaagtacctccaagttgcggtggagcggaacatctactcttcggagagaggggaagctctatggcggcgttagaaaggttggactacggcaacgccagggagatggggaaggttcatcaggtgatactagttcgctactgtcattcgatgtatccggaaccatactcgccaagttgtgaactatgtgaaagtctggatccaatccaagaccacggggcgcaattaaaaggtgtgaagcagcttgctggtgatcaccacggtggtacctacaccggcgggggaacatctttaatgccgagatgaccgcgcgaataatagggagccggcaaaagccgagcgtaagtggaaaggatacagaaatttgctcaaaagtataccaacccgccacttataaaagaccgagaaaagggtaccactagagctcattataaaacatctatgacatgtaataatgctgtggtctttccgccagccgatggtaaccccgctgggactgcggataggaattttgctattaggttcccctccagtgaacctccaggaccctctggaatacgaccttctgagcctctggacggtagaaccgggattggcgacgttgagcacgcccaggcgggaaatggaggattcctggttgatgttctggaatataaagaagcacatcgctacggctccaagtgtgagttttgttatgtgcaaaccaaaggtaccgtgtgctctaagcctcggaccgatgcgtggttgaaatgcgagattctgttcttgcttcatcatgcctatacggctaatcagaacaagagtattgaactcgccgagagtgcttttcggcgagcaggaattacccgacgtagcaaggctaccatcgcgaaaagatggtccttaatacagcgaggtaaaggcaccgactataaggaatactgggacgagtacttcgaaaaattcagatacgagtgcaaccccacacctatagtacggcgcaaacgaaacaggttagccgctgggttacagtcgcccagcagcgtgccgaacggatatgaatttgagcggaaaaggacttgtgaaacgcctcttgataccaaggcttcaagtcttccactaatctgtaacttgctaacaggaattgtcggagttgagaatgttgaggaaaatatgagtgtagaatgcactgagccgaaagagctaagtggaactgcgaactcttctgttccgggtttggcagaaggagtatatgaaagacgacataacaatgtcaacgagccagcggctgggtgtccccaagatgtcccagtcgcaaacaacttgatcgattccccaactactaacgatcgattagaagctgagtttaaggcacagctggatagagcggaacggtcttatatgagacgaaggctacctaggctgaagaacctatcccctgacgaaaggatgtggattggaacaacagtcgagcgcctaagactcgagactgtgagcgaacctgtatgtgaacagtggcggcttgccaacgctgggctatatgcagctatccggtcaatcgcggtaatgcgccccctggacgccgcccgcgaagcccataaaacttggcttctaaatatgaaaatgacggaaaggaaactaagacagcagattggctgggtcgagacgacgcgccgtactaagaacgaggcacgtactgaaagacaagaaattgtctatagaaaagtggccaaactgcgaagggaaagattccccgagatggacctggacagtgtgtcagtccacctcaaacgcaagcttgagttacttaaagggcggattcaagtgagaaccgcagagaggttgcgaagggataccagagaggccgctggtccatatggtaagactgctcttcggggtcaagggtttgccccgaatgtaaaagacgcgactcagtactggtctggattggcccagccatccggacaaaaatgttctgagaactcggcgattctctcagattggaaagaactcgtcgagtgtaatttaagcagcttgccggatcagatggagccgctggtagtccaaggcataagtcgggctagtccatggaaatctcctggaccggacggtatttttaactactattggcgacaagactttattgtggactggttaaagcagctaatgctggattccttgaggaccgggcactatccgtggaaactttcaagtggacgcacggtgctcctgtacaaagacggggatccgaccaaagccgagaactaccgacctatcacctgcctaaacggatgcttcaaaatgatcaactcggttgtttctgaagttatcctgaaacgcgtcgaaaatacgatagctctcccgatagagcaaatggctttacgacgtaaggtatgggcatgtgttgagtctcagatatgggatcagatcaaacagcggaagctgtctgatcgaacacagaaatgcaaggtagcgtgggtagatttctcaaaggcttatgacagtcttaaccatgatgctataaagttcgtcataggagttctaaagcttccgacaggtattaacaactacctgcttgacagtatgcagaattggagcacgcacctcgagcttaaaagctctggaaaggtagtacgaggccctagttacccgattaaaaggggcgttcttcaaggcgatagtctaagcccaacactgtttgtcgtggtgaccagtataatagtacgtcatatcaagacgatcgaaagtagtgatatacaaatgtatatggatgatatcaagttgtatggcaaagatcaggaaactctgacacggctaataaaagagctgcagacggtatcgaacaagttaggtctatgtatgaaccttaagaaatgcgcaattctcggcgacgacctcccagaggaaatcaacgggattgagcaccttaaggaatcatataagtacttaggtgttccccaacgggaaatcacccaagtgcgtgccaccatggccgcacttgaaaagaaaatactaactgaagtagatactagtcttggagcagccgaactaagttaccgccaacggatatcgcgtgttaactctaagatcgcgccgttggtgaggttcgttgtgcagagtatgctggtcacgccacgcgatgtgcttaaagtgtacaataggcttggaggcattgatgtcgaaattcgaagaagactcgtcaagtacgagatcagatacaagaaaagtaatgtagcccggctctaccttgatagaaaagttggcggcattggtttcgtaaacctctgccggataatggtcgaggcggttgcagccagagctgtctactgcagacttgctccctcgtttaatgagttccaagacttccttgcagaacagaataccagcccaatcactgctgcacagacaattttagataagtgcggcattaatattgagctgagtacatctactctgggagatgtaaagaaaatagtgcgaaaccactatcacgagctttggctcacggcatggaagaacactgggctctataaacgttgggagaacgaccatgtagacattaaaagatctagtttatggatcaatcgaggtaacctaagtgcgaataacgctcgtattggaattggcattcaagacaacagtatcttttgtcgaggctttgttgggaacaagtgtgatacgaaatattgccgattatgtggggatggcatagaatccgtaagccatattgtaactggttgtccgactcaccgtacaaacctgtacatagagcggcatgactgtgttgcaagaaatgtttacgcatacctcgccataaggtatggaatccctgtgccacactatacgcagcgagtcaagacaatagagaaaaacggcgatcagtctgtagagctatactggaattacaagttcccatgcacccgtgcactggaagcttgccgtccggatattgttctcatagataaggttagtaagcgaactcatataattgaggtggctgtctcatggcggggacggttacaggaaatggtcgataggaaagtgtacaagtatacggtaaacggagaatacgaagccgatggctcttcccgtgggtggaatatcgtccgtgaactaaacgatcagtacggctttcctgtcgaggtatatacgctagtgattggtgctggaggcgaaatcctaccatgcacggttaaagatgtagaacggctcaccggtggagcggctactgataacctcattgagcgtatggagcggagcgcagtccttggctcatgtcgtatcattaaaaggcatctggcactctaagaaaagcatgaaataataagaaatcagataagaataacaagaatactaataagtatatcatgtaactatgacaaaaagaacgcaccaataagaacatgcttgagtggccagctctgcaggcaaaagtcgaatttggaacagccggtaatggaagacctgcaacaaacgtggggtagcaggcaatatgtaactatgacagaccaaaactccgaaactctggtaatgagcccgtgccccccaagcatgtggtctcgttcgatgtagttaggaacagttctctttaacccgtgatgattacgccctgtcttaaatggcaggtgccaccaaataccgaacactcgttgaggtatggtggtccgaatgtgaagctgggagtacaatttggtacgagagcaccagcgcccccgatctaagtgatgacgcatgcgtcggaacaatgaagacggctggcaaacattcaggagtcgcaaa

SEQ ID NO: 1130 - DNA, 5012 bp, Heterodera glycines
  source 1..5012: mol_type = unassigned DNA
  misc_difference 4992: note = a, c, t, g, unknown or other
tggcgatactcggaacctccggggagcctggtaggagttggcctacaggtcgcgaaagtccctaggtgctgcacgggttgcgctaatccgagggcgctgggttaccttcccatcggccaaaaacgtctgggccttcttagccgcgggtccagtatttctgttgagcctgacagttcttcccggatatggcgaaagattacagggcggtatttcgtgaaacctaaaaawggtcgggccgaatggcacggacagactcacttcggagtgagctcgggggcatccgtgtgttaccccgctgcaccacgccgaagctgtcatagcgagcccgaaggggaatggccatggagactccagcctcaccctgtaactcgaacctaagtccaggcccctttctggtgttggctcgcactggttaggaacacgacagtctcgtgtaatcccacacgcaccgaaagccctagccctcgtaggcgaaggctgcgttgctggtttcagaactgtgagcwagtggggttcggatggccgagtgtaccaacctgcttgctaacaggtagcatagagtaatatgctagtaagcagggcacgagaaagggccgtaaaggctccggctatgaaggaccttgcgaccacgcgtgtgtctcccacgtgcggattcttgaagccagagtcttgcactgcgcgcaggatggagcctgtgcaactcctccctcgctgatcgcaggagtggaggatcaccactctttttaccttgctagcttggggtaccaccttgagctggggccggccttgctagcttggggtacgaccctttgagctggggctggccttactagcttggcgcgccacccttggagctggggtggcgcaagatcacttgtatacggtctaaccaatacatttgaaaagcgatcaaagcgaaatgatatcctgtgatttggaaagagaaaccttaacccaaatggctctctttagagcccgcagtgacaagacgccgacccacgccgggataccagcccctgatgaggtccgagagggagggtgcggccaaaaccgaaccaatcccgcggccccccgtggtaaggcggcagcgattcaaaggcaaaacggcataactattcctataaawgcctgcgctcaatccggcctagtccggacccagagggttcagcagtggtcagccgtggaggagtccgccttaaaggatgtggtggtgcgaaacacagacgaccgggggctcattaattgggccaaaggtgtgctccctgaatggcaaagattgtgccagctcaacccgaccatgtacatggctcgatcgtctccatcgctgtccaataagtgggcatctctgcggcggacccatgttggtcctggatgcccttcgaaagaaggctccgggccctcacaagacctttcagatgtaaaaatccaaccagccaggttggcccatgatacggtggccgagctacctcaacgtactgtcccttgcggcacagacggtcatggtgtaatcgattccgatgagaccgagactgccttagcwgaggtatcccggtcgagtccctttggagaacgcgagccgctcgacttaggggcgacagagaggatcacgcgtaagcggctgcgcaacgccgttcgcgatgtggttccacctcggaaacgcagggttccatccaccccttcacgtaaggaacaagatttggttccagaggtggacgggcctgcacctacggatgtgttgacacacccacccacagaatccgaaccagaaccgatgcttgacccactctcacttgtccaactggtaaggccgcaattaggccgggcaatgggatgggcagccgaggagatggaactcgggaatgtcgtgatggacgtggagctgaagagggagttcaaccgggaggtgaggcgtgtcggaagaacgcctcccgaccaaatgtataagcgtggcgcaggtccaccactcccacagaaacgagagcccgaacgagtagccctactcgagcaactcattgcggcgcgcgtggagcgtggcatcaacaggggacttgattggttccttgaactgaatgtcgcggtctttgcagccgctagggttctgagccgccgggagagagtggaaactcttgctgatcggctgcacatcaacgattctgccactctgtccgaagtatccagacggcgagctaaagccgaaaggaaactccggtgtgcmcgggaacaaccatggatgagcaggcggatcaggawacttggtgtgagggtcgagagactcaaacaactagctgacctggtccggcaaagaatagctgggagaggtaatagatcgtcttacgaaggccctaggcggagattccgactaagaccctctttacgttctgttactgaagcacctgtcaatccaccccttaacgggaatgaagtttacacgttctggcacagcctttgggcgcagagcctccgtgctaacacggatgactgtcaactgagggaattcaaaaaccagctttctgctgcgcgacacacggatctgacgagcgtcggaaccagctcattggttcagatgttcagcgcggcccttcggaaaatgaagaagggcaaagctcccggtcctgatggtatccgtgccgcgtggtggggagtgttccggcgaattgcaccgtatgtggctacgtgggtggtccgagtaatacgwggggcagaaccagtagctaactggatctgcaacgggctcactgtcctgctgcccaagagtagtgacaatgccgaccctagtaactaccggccaatcacatgcctaaatacmtgctacaaactcttcactgccgttatcgcacaaataaccgcaagttacgttgatgttcttggtggcctacctagacaacaagtagcactgcgaaaaggcgtttggggcacctctgtgtccctgatgatcgatgcgctaacggtggctgacgcgagaagagctaaacgcccacttggagtctgctggttcgacttcaagaaagcgtttgactcagtaccgcacaacttaattcgctggatcctgagagtcatcggactccccccggtcatcttgtctgtcattgtctctgtgatggatcaatgggcaacgaggctmaagataggtggaaaggtcatgcccaagaccatcccggtgcgaaccggcgtattccaaggggacaccctatcgcccctgctkttctgcctatckgtktggccaatmtcgttcgccctagaccaatttcctcagtatcagtttcgttgtgcaaaccatcttcagcagggctttagtgtcggacacgtgttttacatggacgacctgaaatgctattgcccagacagggaagtgttgacagcagttattcagcaggtgcagaagagcgcttctgccctcggtctgacgatccactacaagaaatctgcgtggctcgaccaggacggcgggaaaagtggcaaagccgtcttgggtgtaccagwacttgtcggcacttacaagtacctgggaatgcacgagagattcatgattgtaagcaaagacagtcttgagtcagtcaggggaaagttcatggggcggcttaaaaccctgtggacctcgaaactgacattcgggcaggcaatgcttggcacaaagagcmtctgcatgccagtcgtgcgctacgtgctgcagaatctattcctaccaaaatcggaattcaaccagacccgtctggtcctgagagagtgggatcgtcagatcagagacctactggatgaatgtaatatccggcaggttttccgaagcaagacggagttatatgtcagccgcgaagagggtggctggggtcttcctagcatggaagacgccctcgaggaagaggtagtcacaaaacttgccatacttgttgcaagacaagaaactgagccgttgttccgggtgtgtgaagctcttgaaaggaaaaggtgccccacccccctgtccctaggattgcaaatactgaaggactggggagttggggtagagttacagggccgcacattgctgctgaacgggaacacagtgggcccatctcaggcaaccagaaaactcactggagaactggtcctgaggagggaagcggaacggctcagtagatggagaagtaaagtgaaacctggctgtggcatgactggaggggcatggcgggatgtgcccggaatcgatgtccatcttagcaataggtggctcgtcaaaggtgcactgtctccgaccgttgtctcaaacagccttgccatacgagcaaacacggtgattctgagagggagtggcgggggctacaccaaaggtaccctcctccggtgcagaggatgtggtaacacgggagaaacacgcagacacattgtgtcagcatgctccctgggaaggcagaagggggctgcctcccgcaggcacgacaacgtctgcaggatattggtgcgagccatctgccacaaactcaacattgaaccgcccaactcagccaacttcccccatgtcgttgtgctggaaggcagtggtgctaagatgtggatagactttcccttcgtggtgccacataagatccgccacacacgacctgacatcgtcgtcttgtttgagtggaacggggtcagacgtcttagtgtcatcgaagtggctgttagcgatgtggcaaatatgcaaacacaacacatccgcaaatcccacagatatggcaccaactcgactgaacccttcgtcgcgggggtcacgcctacgtataggaatgactgcctggcagcgcagttgcgagcgaaatttaaagcccagcaagttgatgtgatcccgatcattgtcgggaccactggtgaaacattggatggcgagtttgggcggatccgaaagggtttgcctatgctcactaaactgcagatgccaaggctgtggtcagaaatccagcgggcggtgatcctcggatcatatcgaattttggttgaacatcttgcgctaccaaaggggggcgcttgaggactcanaattgacaatacacctcaga

SEQ ID NO: 1131 - DNA, 4446 bp, Parhyale hawaiensis
  source 1..4446: mol_type = unassigned DNA
ccgaccgccagcgggataactggcaaaccctgtctcgaccaccggcccgtgaatccatcggggcgtatgagtctgacacaggggggtgtttaaggtgaccctgttgcgaggaaatgcgcagcaaaagccggatgagccttagaacatcgaaggccaacgacaacctgccgaaagactggcgactaatccagtcaacctcctgtaggtcaccggctggtcatgctgaatctcagcttaaccaggcgtacgaacttacagttggagggtcgagcacccctgatggctgaaaaggaccatcaaagtcgaaggtagccaacgagaagaccaacggctgattcaggcggaagagtcaactcgttgaatgcgttcgacagcttggggtagatggaactcctaagccctgaaaggcagtccatcttcgcagacgctaaggtgccccgccgcctgagggttatcaggccccgccgcctgagggttaccaggcaaccatgaaaatgagtcataatagagataccccttctaacggcgtgaagggtacctcagttagactgggtacctcgctcgtccggtctcctgtgggtgaggcaggggccgttcgtgaacgcggtactcacccgtcggaatcggttagccaggattccgacgctagtgtgaatgctactggagaggggagtgtgagggagcaggctcccctttctccgccgggggcggaggaggctactgtcccgacgcaacgccgcacgcgccacaagtggtccagggaagaccgagttgtgctgtgggagtgcttcgtcgccagcaagcgcgaggggccaggctatctcaagcgcctcaagcagctgtgggacgagagaggaatcccgggcaatttcccacaggcttctcttagtggccaaatccggcaaatctgcagcaaaaacctcctcagcgaagaggaacggcttcaaatcgctgcgcggatggaagctcaagttgcctctccatccgctgacgaacctgcacgccaggttccaacccgacctgtgaccccgcctaggtccccacctgtggaacctgctaggcggccctccattccatcggaggaaacccccgacttaggcgctgtcccgtctgagatcgactctgccgaccccaaccggtcgccctcacgtgggcctaggcacttaccggcccacaatatgagccagagcgagtcagaagacgatgtgacagatcccgacgtgtctgaccagcagcggagtgactcgctggagccacgggacttactccgaaactccagcgtagaatcaacgccaggtcaccctaaccaggaacttagtgacaccctactgtcgaactacgtcccatctgagatcgactcggacgaccccaaccagtcgccgcgacgtgggcctcggcacttaccggcccacgatatgagcctgagcgactcgatggacgaagagacagaacctgacctatccgaccagcagcggagtgacttgctggagctgcgggacttactccggaactccagcgtagaaacgacgccaaaaggtcatcctagcctacgacatctaccggaaccgaagatccgagcagctgctttccgcgtcaactcagtgattggtaaaatccacaccaacaacatcactgagacaaacgccctcatcaaagctggagcagacctcgcagtgaggatccttgaggtacaaccccgaccgcaacggacccagcggaaaaaggatcctccttggaagcaccgcctcgagaagaacattgctgagatcaggaaacatctcagctggatctccgaatggcgcagaggaaatctccacgacgaggaaaagaagacgctgctcgaatcgaggtaccggtgcctcgaagtcggcctaaccaacttagaagataccttaaagcagcggctatctgctaaaaggagcaaagttagacgcttcgaggccagagtagctggattccatcagaaccagctattcaacaccaaccagaaacgcctctatcaaacccttagaggagaagagacgagctctgactcacccaacgcagaagagagcatccgattctggagtgacatctggagcaaagaggtacggcacaacaataccgcagaatggctccacgacgtcaaggagaagaacgtcgcagcagatccagaccttacaatcaccagtcaacagctcaaaaagcaactgagcaagaccaagaactggaaagcacccggaccagatatggtgcaaggctactggatcaaaactttcacatcgctgcactccagaattgctgcacagctcaaccactgcctgcaacgcggaaccgtgcccacctggatgaccacagggaagacggtcctaatccagaaggacaaggcaaagggcacggaggtcagcaattaccgcccaatcacgtgcctcccccttatgtggaaggtgctgacgggcataatctacgagagagtctaccaacatctagactcaaagaagctcctacccgacgaacagaaaggatgccgcaggaacaccaggggaacgaaggaccatttgctcgtcgacaagctcctcacgaaagatgccaggagcaaaaagaaaaacctaagcatggcttgggttgattacaaaaaagccttcgacatggtccctcactcctggatcctggaatgcctggacatctacggcattgccggcaacatccgcaatctgatcgcgacgaccatgcccaactggaagacccagctcacaagcgccaataaacacctcggcgaggtgagcatcaagcggggcatcttccagggcgactccctatctccactgctctttgtcctgaccatgatccccctctccgagaccctgaacaaggccggccagggctacaactacagtcgtaccatgaagctcaaccacctgctttacatggacgatctgaagctctacgccaaatcaaaggaccaagtagagcagctccttaatatagtccatcagtactcccaagacatcaagatgcagttcggtgttagcaaatgcggagtccttaacatcgaaaggggagaggttactgcgtccgagggaatcaccatcgaagaaggtaccatcaaggatatcgaggaggcaggttacaagtacctgggtgtcatggagtataacaccattctccacagaacgatgaaagattccattcggaaggagtacctcacccgactccggctcatcctgaaatcacacctcaatgggggcaacaccatcaaggccatcaacacctgggccgtccccgtagtccgatattctgctggcattattaactggaccaagaaagactgcaccgacatggacatcaaaaccaggaagctcatgaccatctatcgagcactgcacccaagatcgtgcgtagacagactctacattaacagaagagaggggggccgtggcctcatcagcgtcgaggactgcgtcgaagcggaaaaacgcgctctctcccaacacttcagagagagcgacgacccgtgggcacgctgcttagtcgaggcgaagttgctgaaagagaccgaaacggctgaccaattcaaagagcgacggcgcctcgatcggactaacaaatggaagagcatgaagatgtccggccagtacctcgaagctgttcaggacaaaatcgtaccagactcttggaactggcttctgaggggtgagctgaaacgggaaacagaaggcaccatcctggcagctcaagagcaagccctcagaaccaggtacatccaaaacaagatcgacaagagaaacgtccctagtacctgtagaatttgcaggagctcggatgaaaccatcaaccacgtgataagcgaatgcggagtgctggcgcaaaaggagtacaagcgcaggcacgataaagttgcccgacaccttcactggaccctcctgcggatccataacttcccggtcagtgagaggtggtacgagcacgaacccgcgcccgtggttgaaaacgaagccgtgcagatctactgggacaagaggatggaaactgatcgagtacttcacgccaaccgaccggacatcgtcgtcaaagacaaacaggagaagtcggccaaactgatcgacatttcaatccccttcgactccagaatcgtggacaaggaagcggagaagaaggaaaagtaccgtgaccttgccatcgaactccagagactgtggcagatgaaggtggacgtcgttccagtggtcatcggagctctgggggcaatgtccaagaatctcaagactgccctgcgagagctgaagtgcggccatctccacccaggaaccctccagaagagcgctctgcttggaacagcgcacatcattcgcaaagtgctctgagccttaggtcgcgggatgtgacccggcgccagagtgtagagctgaacatcgctcaaccgatccaatttgggtcgtgaaatcccctcgataataataataataa

SEQ ID NO: 1132 - DNA, 5225 bp, Bursaphelenchus xylophilus
  source 1..5225: mol_type = unassigned DNA
gaggatcctgggttcctactaccctgctccatctcctcgcgatggatccttggggaagtctccggactgagctaagagagcgttaaagtagagggtggcggcgtagtgacttccaagttgcgatggggcggaacatctactcttctgagagagggaaagccctatggcggcggtagaaaggttgggctacggcaacacttgccatgatcagattcgatcaaaattagcctctggggctggcaaccctacaacggattgtaaactgaactatgctatgcaaaatgaaaataaaaaatgggggctttacaatctaaggtgttggcagatcacgaaaactgcccgtcgatgagggtgagataacatcctacggaacagcccctgctggaccaaaccaaatcatccacaaattggagggttttcttggtagtttcccttggcacgtcttgtttcataagccagaataaaaacgataccatacagacatgaggctgggtacctgccagccgcgacacggaaaaccggtaggtgcaaccggagacagctaggggaaagaaaatagtaaagtgtcgaaaacaaaacaggtagcccctggctagagggaatgggacattgtccgattaggttgccttgacccaatgaaagccaaccgggtttacattatcggtctaccaagggcaatgaccagagaaactgcgactatgccgtaacccttcgcagattgccgatgagaaccatcgatcgtaagtcgaagccaagcggattgaccagtggagggttatcccgacaacagcatggtattcaataattgtaaacctaaacacctgtgccctgcgatccgtccgacagggcaacaggaaacgaacggtggtagcgagggcactgctgagcctaccgctggtccttcgagaccggcagtgagcgaggatgcagcccaaccggtgccactgttcgaagagggcgaatatataagggctcaccgcgataagacttgtccttattgcgaagtcctgtggataggagcgcggtcttcaaaggcccgctccgacagctggccattgtgccaaatcttgtacttaatgaagcgcaacgacgacctcagaggtcaaaggacgaggtatccactgctcgagagttctttgagagcagccggaattgcccgtactaagtttgcgattatcaagtgtattcggaacgtgttgagagaccggtatgtgcccaacggcccatactctgagcattggaaaatttaccgcgcgaatagcggggaagttcctcagggagcgaccataacaaaagggaagaggtccgccagagttgcggggcttccctccccaagccagagcggtcaccacacgaaacgaatacaagctggaactggaattgaaacggaaactacggtgactgagactaacacaacacccgaggtttcgcatgaacacagagatccctgcggggaaccagagacgagtgctgctaatgtagataaggtaacggaattgacggaagatgggtctgaaaccagaggaactgcgaacgtcgctaacggtggggtttctgttagcgatcctggtcgtaaaaggcagagttcaagccaaaatagaggaaatatcgaaacgactaatccagaattagtcggtatgtgggaagacatgtttggagtgcagcttgatggagcgatgcgcacaacagagcgaccaaggctacccaaactgaagcacctgtccgaacccgagaggttatggatcagggcgaagttggaacaggcttggctgcagtgcgttagctatgacgtcgaacagcaatggcttaacgccaacgcggttctatacgccgccatcaggtcagtcgcggctagcagaccttgtaaagaggcccgcgaagctcaaaaaacatggctggataataaaaagaaggatgaggcgaaattgaggcggctgatcgggagaatcagctctgtccacagtatgccgaaaggcgaccgtacgccacgagaaaagaaactcgtgaagaatataactaagttgaaaaacacccactatccagacatggattggggtggacttctgaaccattttaaggtaaagttgtcgcaacttaaagaaaagattagcgtgcgggtggcggagcataagcggaaagttaatcgtaacgcagcaggacagtacggcaaaagtgtggccggcagcgcagggttagcgccggatgtcgtttccgcgacggcatactggtcaggtcttgcacaacctgggccaaagaaatttaaagcaagctcgccgatcttccagacttggaaagacgacgtagcgaagaacttgaacactgagccggtactgctgtatccgatcataaaagaatgcatcagaaagccaagcccctggaaagcaccaggccctgacgggatatacaactattactggcagcaagagtttgtggctcagtggatccaaacccttgtgaagagaaccctggatatagggcggttcccgactgcacttatgtgtgggaggacggtactactcttcaaaagcggtgacaaatctatgcctcagaactatcgacccattacatgcctgaatggatgctttaagattaccaatgcggtattgacgaaagtaatccttcaacgggttcaagacacttgcgctcttcccagagaacaaatggctttgaaaccaaaggtgtggtcgtgcatggaagcgcagttgcgcgaccaggcacttcagtctgagatcggtgacgattgtaagactgcatggatcgatttttccaaagcatacgatagtctggaccacgacgccttaagatttgtaatccaaacgattgcactgccggcagggatggaagagtaccttctgaaatccctggatagttggagaacgcaacttgtgctatctgatgcaggtaaggttgtctccggaaagccctacccaattaaaaggggagtgctccaaggagacagtctgagtcccgcgctattcgtcttaacgacgagcccaattgtcgctcaccttcagagaacttgtcccacgggtcgtatacagttgtatatggatgatattaaactctatggcaagacagagtcggacctgtgtatgttaataaaagaaactcaacgagtcgcaaacaaattgggcttaaacattaatttgaaaaaatgtgccctctttggtaaaagtataaaacagagtattgccgggtttgacccgctcggcgacagaacatacaaatatctcggcattccccaaagggatgttgcagatatcaaacaggcatatgacgaactcaaagctaaaacggtgcagaccatcggcgaaacgatggcgtgtgactatctaacaacaaggcaagttatcaacagattaaattcgaagataccgcctgtagtcagatttgtcacacaatctgcgctgtgcagcgcgcctatgaccagaggattatataataaaatcacggaattggataacgtgagtagagcagagttaaggaaagttcttatctataaagcgaccaatgtctctcggttctacctggccacgaaagaagggggattcggctatgcaagcctgcagcaggtatttgttgaagctgttgtgagtagagcgatctactgcctgagagctcccagtctgtgtgacatacgggagttcatattgagtaagttcgaccctgtcaaggttgctcgcattgcgttggcaaggagtaaaattgacatggacatcgaacggatggacatggcctcggccacgcgtaccatcagacaacattatcaggcaaagtggaaaactctgttccaacaatcgaaactttaccaaaagtgggtgcagcataagatcgatatacccaactcgagtaggtggttgcagaggggggaaatctcgccgcgaaactgtcgaatcgcggtagctgttcaagataacactttactgtgcagaggatttgtggggagtaaggacccaaacaaacaatgtcggctatgcaatgctggcattgagaccgctagtcacatcgtgactgaatgtagtacacaccgggttcacatgtatatcgaacgtcacgactctgtggcgcgaaatatatatgctgtcctggcaaaaaattgcggtttttggattcctcattactcacagaaaatcccaacagtaaagattacgaagtcatatgagttgtattggaattacaagttcccgtgcacgcaagcactggaggcttgtcgtcccgatatcgttctcattgacagagcgaagaaaagaatcctcgtggtggaagtggcggtctcgtatgtcacacggctagagcagatgacgcagaggaaactctataaatacggggtgaacggcgagtaccaggctgacggggaaacccgtggctggaacatttgtcgtgaacttgtacaaaagtacaatatgagaattgatctctgcatagtcgtaattggggcatgtggagaaatactcccttgcatggttaaagaaattgaaaaaatatccaaggtctctggtcggcagctcctagaacggtgccagcgtagcgctgtacttggaactgtgcggaccgtaaggagacacttggcaaactaacaagtgtaataaaaaccacccatgcgtagtaaaccgatcaattatctagcaaaatcgcaggtcagaagaccaaagaaccgacccagaggaataggaccagagctgaaactctcagatacgccaacggtcctaataaaacgtcgttaagtaaagcatcgttaagtacaaaacaaaagcactgtaaacgcgaggccccctctttgccaaactccggtaatcctcgtagtacggtgctttttcccgcttcacgaatcagaacgctgccagatcttgtccgacatgggccgtagggtttgggagtaccagcgtggggcggagagcgtacctgggtacactgcataatcgggtctcagaaaaccacctatggtttattattctgtctcccatctgcagggtagcttttcgttgggccataggagcctaggggcaagagtgcatgtagtcttcaacggccatgccagggaaacttgtgagaggtgagggataactagcatcagataatatcagtcatgaaattagtaacaaccaacgttcaccgtcgttggcaaaacaccgactaacgatgctagttagaaagagtcgggtcttcccaaagttaggtgcttgcaccgaagccgatccgctctacccacagctctgcccagcgtt

SEQ ID NO: 1133 - DNA, 5657 bp, Heterodera glycines
  source 1..5657: mol_type = unassigned DNA
tgtggcgatactcggaacctccggggagcctggtaggagttggcctacaggtcgcgaaagtccctaggtgctgcacgggttgcgctaatccgagccccttccggtgttggctagcactggaggggggggggtccaaagaatacgtgaagcggaccctgtgttttctctgacctcatacgggtatatcccgatgatatctatacagtgttcattttcatttcttaacctgctttttcctcaagagaaatatgaccacattcgtttgccatttcgaaggtgcgacttttgagggagttctcagggacatcaagctgttcatggacggcttgacggctcgtggcggcacgcagccgcgcgggccagttagggctggtgccaatgaggcagcgaagaagtctctgaaacgccaaaagcagcgggagaagagagagaaagcggggacgggttagagataatagcatgattgacggcgaagcaatactttgacttccaggtacggaggacggcggcaaaaagcaaaaaggggacgaaaccgatggcattgccaaaggggccgaaaccattgagctggacgctgatgggccgtctgccgcgcaaaaggaggggggagcccctccgtctgggaagaaggtgcggcgccattcgtccaacaaaccggaatagatcttgatgatctcagcaattgatcatattgatctctttttccagttgttgcgataaattatcgtgcattatttcttcgatttctccaaagcttaactcctttcctaatacctactcatgtatacgttagtaggcatgttttatgcaggtaaagatagacctggtgcccccgggcgacttgggatgtggatgatggttggcggagagttctgatgacgccgtagttccggaggaacagttcctactagtgccagcctgggctagtggagctggtctggcgagtgctttgctcgtcagataaggggtggttggggtggtacctctggaatgatgtgtcggataagcactctgccttataaagctgtcgttctgcccaggtttctcctaaccaggttgaacttgtaatgagcctttgggtatctggtcggggtctgcgcggagatagctcgtgaggagctgttattacattattggttgaacgcttttgggtcgtactgcacagataaatatgagaaaaagttttttacaacatatacctgagctttcaagtcatattgctatgtctgtgcctgcgagaaattatcccaaaatgtgctctttagcacagggttcttccggcacattaagtcataatgggaagggtgtcgcaatgcaccggtgccccagcgatgattgtgctggtaaagatccccctcagcgggggtctcaaaaagggaatttgaggagtgtgcgatggactcccagcgaggagaaagctgtcttcgagtattggtcacggttggaacagcatgccatgttaaatggtagcgaagcccgggggacctgtgccataactagaagtcagtttctcattcattgggatggcgagagagagtcaagatccttgtcggatggtgtgcccgagtacccaatgaggacggaaagggcgtactatgaaagggtccgactcttgcgacaacgcggatggcaatgggattgtgctaatgaatgcttagtaattggccaatgtgcagagccatgccgtaagccaaacgtggtagcgattaaggctgataagggtatgaagagatcgctggttaagggaaagcttttgtccctgccccatgtaatgggcgaaataaaccaagtgagcgtgcaggttgaggtgcctttgccaagtgtacccgccagcgtgccccaggtggaaggagttgaaagcaaaggttttactgaaacggaaccgtcgaataaaccttccctggaagggaatccggcggaagaaggattaaggaaaccggagcgagtaaacgtacctgttcatgggataatcagtgatagtgaacggaaagacctgaaagaccggttttggagcgcctataaaacggccaagaggtctgtgggttttagaccggctctaaaaatcgaaccgaatagggttaaccgtgcccagtgggaagtactggattcctgcgttgttgaggtgctcaaaaagagggaaacctccaatgggtaccgcggttgcgtcctccggcatttgaacgttgcagtttatgcggcgggatacgtgctggcggaaggcaacaaggaaaggaggcaggtgatcagacgccagtcggcggaatggttgcttcgccaaaagtccgaaatcaacaacatccgtagacacatcgggtggattaccgatgagttaacacggaggaggacgggaaagaacccaacatccagacagttgagtaattttgcatggttgcaaaggcgataccaggttttgggtaaacccgtgagggaaacccgggacttggaagtccaacgagaaagacttgtaagtcgtcttcgattggctcaggaccgaattaactcttccatggatcgtgaagagcgagttcgtaaacgaatgttacccctgcggagaaagttggaagaacctttgggtgactctaaacttgacacaaagcaggcacgaacattttgggccagcctgattggagagcgaaaggaatttggaaaaatcccggagcttgaaaactgggccgaagaagtgaggagcaaagtcaccgatggacaaggtttcgcaagtgaccatgtggatcaaactgtttggaaaaagatactgggtaaggccaggccactgaaggcgcccggaccagatggaatccccaatttactttggaaacggttaccatccgcaaaccaggcgttatttaagtggttaatggggatcaagcggaaacagctcagtgtccccagttggctcacaaaaggaagggtggtcctcctacccaaaggaggtgacccggtagacccggccaactaccgaccaatcgcttgtttgaacacgcagtacaaactagtgactggtatggtgacggcatgggtatcggaacacctgaccacatactctattttgccgattgaacaacgagcgatggtgtctggcacttgggggtgtacccatgctatggtgattgacagagcaattacgtcttatgcagaggccactggactaccgctttatgtaggctttgtggactttgcgaaggctttcgactcagttagtcaaccgtggatcaggtacgctctaaaggtcgctggagttcacaagcgaatccgatgtcttattggaatccttatgaaatgttggagcgtaaggtatgaagtgttcaagagcgggagagtgttaaggagtgcgcctttggcagttaagaacggagtgttacaaggagacacgttgagcccgctgctcttttgtctctcagtagccgttgtttcttctgcagtaggcagcctctttgattttgaggtcaccatacctggacgaggagtgatgcagcagcagaaccacttgttctatatggatgactttaaagggtttgctcctagtgaagcgtccttgactaggatgttagtaacattggagcgaaccgcttcagccctcgggttgaaaatcaataagaggaaatgcgctctggtacacccccgtgaaagagagaacgaggaaactggaagtgatatcccggtccttggtctacgagacacttataaataccttggaatcgaagagagatttggtatcgttttcgaggatgcgtgggaccgagtccgtaccaagatgtttgagagaatgcgcaccttgctatgcacggaacataccttcggggagttgcgtgcggccttcgctagtacgatcgccccagtagcgaggtacctctttctcaatgtaatcgttggtgggcctagttggagtgaaaccctgacgaaagctaaggacatggacctgcgtatccgacgcctcctgtgggaaagaagagataacgagccgggatggcggtttaagcattgtagtgctgaccgcttgtacctccgcgtacagtacggtggacttggcttcgtgtccgtagaggacactttgtctgagtctatcatttactgttgggcttacgtgcaatgtaggcccgagttggagctggctcgtgaactttttggaaccttaaacaggagtgctagaagcggtataaaacagagcattgcgaaaggagcgcgtaaagtgttccgaagttatgcccttctctcgaaaaattccgcccagcgagtatctgaccttgatggggatgcctccccaggattccgagtaggggaaatgatattcatggaaccaactcggggtgccagagcaatcgtaaaaatcctccgtaaggagaatgattcgcgacgcttggctgcctggaaaggtagacctatgggaggtcgggtcgtgtcattgccagagctcgaccaggttcatagctaccactggttgatccgtgcgaggattggcaggcgttcgttccgagactgcattgcagcacaggagggacagttgaaagcgcgggagcttatgtgtccacatataaatgcgaaagcaaagtggtgccgacgatgtggggacggtcgtgttgaaaccgagcagcatatccttagtggttgtgcttggtcacggactggaactatgttagatcgacataacggtgttgtacggcaagtacacacggctttatgcaggaaatatggactgcccgtttcttctcatgtcgttcctttgcatgcggtaatcgagaatgaacatgccaaaatcctgtacgatgtcgcgttgcatacttcgcctgctggcgtcctccctagggaggatgggagtacgagttatacgggtctgcgtagcaccaggcccgatatggtaatattcgataaaaaagcacgtacgatccttattgtggaaatttcggtgccatggagagagaacctggttaaacaggagctcataaagtggcggaaatatgccataaattctatgatcgaaccattggaactagcggaagctgaaataccgggacctaacctgaaacatgcgttaggccttgcgtacggtacgagtttcccaacagtgaaggtggtcccgatagtagttgggtcgtgcggcgaggtattaccaaatataacgaagaggctgagtgaacttgggatacctaaacgaggaatcccgagtttgcttgagtcgatacagcgtgctgcgataattggttctggacatgttatccgggcgcacttgagtgtacctaggagcgagtccgagacttagtcgtagcccagatgtcgacagcccctacaccggtagatggaaggaggtatgtatctaagcccacggcaagccaccagtggaaacggtgaccacctctgttcgcggaaatgccccgtagagtatatgaaggtcggagcattgaagcacaagtgagaaccctggaagtatggtggtgagctggtaacctcgaattcctcctatgggtgcttgcgcccgtaggtcatttgtgtatgtagggatggaaggaatctcgatagcgcaaatcgggataccgcactggcgatcatgctgccagtgggccctgctgagttgggcgggttagcaacccgtccagggacgcagatgccaaaagcctggtgacactctaaagggagtctacggcgacgagaacatcccctaagtc

SEQ ID NO: 1134 - DNA, 4513 bp, Strongyloides ratti
  source 1..4513: mol_type = unassigned DNA
cgtcagaagagcaggtgtttttcaaagcaaagacttattctacgaaggggaaagatgatcaaacatgcagatttggctgcaatgaaatagaatcaaactaccatgtggtgacatcttgcaaataccattcatacacaagaagacacgatatggttgtgtacaatatattaaaaagactaaaagaaaagtataagttagatggtgatttacaatatggtagatcagtatttaatgggaagaaggaaaaaattaggatcagatctggccataagtttttgactgaacaaccgttagtaaacaataaaccggatattgttataacgatgaaagaagggaaaaaaaagataacgtacatactagagatgtcgataccacatatctagaacttgaagatgcaagaaagaataaagtataaaaaatattgtgtgagctccatggtaaaaataacgaatgataatgttgattcgatagctcgtgattttaatctactaaatttaatggaaagaaaagaaaggtgtaagataaagtttggatcatttgtatttggctgttatggagaatatgtcttgactgaatctgctctaagaacacagaaaatcctgattgaattgggattctccaaaaaagagatggatagcttgatcaaagagtgttcttacagttaaatgaatgagacagcaagaattattatgaaacatctagaaggcgaaaagaatcaagatgaaatcagccattaataacttttatttacccaattatttattgcgttaacttgattatatgatatttattgtatatttattgtttaatttagtttcatagtacaaataaaagaatatactacgattctttacttttaagttctacgagaacgttgttttagaatattttaataatatttctactacaattaagtaattagaagaaatcaacgaaagcagctaaacttactcgcaaaattcgttgatcgaggctggaatggcaccaactaatatactaaccaacaatagaaaaaaaaagaagaacttcagtggacttcaaataaaataaaattattggtagaattgtatgataaaactgagaaaatttgactaaaacaaaaagattagagcaaatatgtcatcattttcctaatcatacaattaaagcgatgatgacgaaattgagagaatttgaaagagaaaaaagggaaaattgtgaaattaaaatgagggaaaatgaggaaaaacctgaggaaaaattaaattttgacaactatgaagaagcaaaattgaaaagaggaattaagtgtaaaaaagaagtaaaaccaattgttattgaaaacaaggattaggaatttttgaaaacggaaaaattatttctcaagtttgtcaacacaatcaattaccaaagaaagaagggtaaatcaaccagaatgcaaaaatttagtgttccaaaggactcttctcaaatattcttagtggatagtatcctaaacaaacatatttgctcaaccaaaaacaaagttaaggatgtcattaagaggagaagtattattaagacattaatatgtgcagctggtttaactcttagaaagttagtttgtgggaaacttggaaataataaatataattccaagataaatcaactttggaaaaaagaaaggaaaattattaattgtatagaagatttaaagcatttgatagaaacgaataaacgtaggcacaattttgggaaaagattaaggaacgccaaagtgagcccttctgagatgttgaaggattactacaacaagttaagatatattaaaaatgaaattacggcatgcttggatgaacacaaaaaagcaattttaagaacaaaatttaaactaacaccaagcattaagatcatctcaaatattcaaaatcataatgatgaagaggctgaactcccaaaggaagaagaattcgtcaaatactataaagaactatttacaaacaaagatggggatgataaagaaacaccacatcttgacaattggttgaagaagtttagtaagacattaattgtagactggactataaatgacaaggagattcttgaagctttaaaatattgtggtaatttcaaagcaccgggatctgacatggtaatgaaagtttgttacaaatggttcaaatctgcacaaaattatctaatcagatggatcaaatcaacttggtatggtgaatacacaataaataagaaagatacaaatgcagtcacattcatgatttggaaaagagatggtaaaccaaaaaatgatgtcaaatcatatagaccgatttcttgcttgaactgtgatttcaagttactaaacaaacttattgcaaacaagatttatgaatcaatagagaaaattttgcctataaatcaaatggcagtaattaagaataaacatggaacatgtgaagccctactcctatacaaatcattggttcaatcaatgaaatttagaagaacgaaagatgtgaaagaaatatggtgttcatggattgacttcagcaaatgttatgactcaataagtcataagtgtttgaaaaaaatgatacaaagtattaaggctccaccaattattcacaaactcattttagatggaattgatagctggaacatatcaatttgtaatgggaaaaatatttccaaaactaaaatacctgttaaatctggtattcttcaaggtaaagtggctagctctttatattttgtattattgactggtgaaatatcttatgctttgaacaaggaagaacaagtaccaattgaaacgattacaccaagcaacactttgaaaatcaaccatatcagttttatagatgattatcaactgtatgctacatcacaaaagaaagttgaaaaactaactattaaattgagggaaatagcagaagagatgaacctgaagctgaatccacaaaaatgtggcatatatggcacagatgatctgggaaagagactaatgctgaaagaaagttcattaaactttccatatacttccgagtacaagtatcttggtctggtagaaaattcattggacttaaaggatatcaatatccaactgtttaaagataaaatactatctaaatactcaactatttttgaatcaagactcactacacaccagaaaagaaaagtatttaatagtacaatatctccatgcgcagcatattacctaggtaatttaataaccaataaatgttcaattcaagaactattgaatgaatgtaagaaattcgatcaaatggtcagaaatcagttagtgaaccaaaacatcaaaaagcttcaagtatcaaatagtagaatctacttacctaaagaatacaactcccttggattaaacgaaatagaaattgaagtagcagccaatataatcaggaaagcttgttacattaaaaaaagagaaactcttagaggagtagacaaactatatattgcaatgtcaaaaaatggtcacagaaacactcttagtgatgctttatatataactaaaaaatactctaactttcaaataaattggaatattatgggtatggtgaaagatcaaaacaatattcttctggatgcgaagaaaattattgaaaatatcaaagagaaaaggaggaacctatggctggaacattggaaaaaaggaaacatgacatatgcaaatgaagcaatcaaaaaagaattccatctcccggacctaaacattgactccaaatacctcatgttgtgctatgctggttcagaggaacaaatcatttataatggacacgtaagtttggttaatcaatcctcaccgtctagtagattatgtagaaagtgtaacaaattggaagaaacttcataccatgtggctagtgtttgtgaattccataaaaagaatctacatctaatgcgtcacaatagtgcagtttaccacataataactgaactctgtagaatcatgaaagtcaaatgtacgctaagatatccagaagcatcaggaataataaaaagtggaaacatgaagattgctgctggagtaaaatacacttttggaacagcaaaaatataccataataagcctgacttggtatggtatactccagaggtaatttatgttatagaagtaagtatttcatcactgaagaacgccaaatctcaaatgaaaatgaagactgctagatatgcagtaaactcaacaaagaaattggaaaattttgctgctctgaataatttaaagaagggagaaaactttgttgaaatattaagtcataaagcaaatttcaaaagagtccatttcatgcccctagttttctgcacttttggtgaaatacctaaagaaacaatgaaatacctggaaaaactcaacttttccaatgaaaagattaaaacaattgcttcaccaatcgcacgttacactggaagaactctcaaagcacattttactaattaattagatttatatgtgccactttacctcaaagatatattaatactaacttaattataatttattatgaattataatataataagttttaaaataaaa

SEQ ID NO: 1135 - DNA, 5185 bp, Bursaphelenchus xylophilus
  source 1..5185: mol_type = unassigned DNA
gggtcctcggttcttactaccgtgctccacctcctcgcgatggaccctggggtaggcctccgggctgagctaagcagagcattaaagtaaagagtgacggcgcagttgcttccaagttgcggtggggcggaacatctactcttctgagagaggggaagccctatggcggcgttagaaaggttggactgcggcaacactagccatgatcagattcgatcaaaatagcctctggggctggcgaccctataacggattgtaaactgaactatgctaacctgtcagtaaagacagaacgggggctttgcaatctaaggtgttggcagaccactaaaactgccctttgatgagggtgagataacatcctacggaacagcccctgctgatccaaacaaaatcatccacaaatcggagggttttcttggtagtttcccttggcacgtcttgtttcaaaagccagaatataaaacaataccgaagtacagaatggctggaacctaacagccatggcacagaaaaccggtgggtgcacaccggagacagcaggggaaagattgcaaagtgccgtaaataaagatggtagctctctgacctgagggaatgggacactgtccgattaatgccttatcccgaagacggtcaaggttctatcttatcggtctccaaagggctctggccatagaagctgcgaggaagccgtaaccctacgcagattgccgccgtgcatgataagtcgtagccaagcggatcgaccagtggagggccaacccgtaacagccatgagtttccataatttagaaccaaacaacctgtacccagaaaatcttcgtcctactgggtcacaggacgcgaatcgcggagttgcggacattgctgaggaggtgactggtccttcggggctggttactaacgaggaggcagcgcgagcaccgccgcttttcgtagagggcgaatataaaagggcacactgcggtgggggcaaatgtcactactgcagggtcctgtggataggtgcgaggtcttcaaaggcccgtaccgacagttggaatctctgtgagattctatttttgattaacaaatgcatggaacttggaaacgtgcgtcggatttacagtcctctcgagagttctttgaaagaggctggaatcaaccgaacacgtcatgcaatagttaagtgtcgactagctgtcatgcgtgatcgatttgtggataacgccccatattctgagcattggcgtctgtataacgcgtgtgcagaaaatagggcggtggtcgtcccgatggactcggccacaacggtgaagaaaagaactgctagacaagcgggcttggaatcaccttcgcaaatcggggtcgctggcaagcgagtccacgaagctgaaactggaactgatcggattaacgcggtgattgaaacgaacacaactccgctagaggatattgacttgagtccagagaccccagaagggcttgcagagttgcctagtactgtagagataatggaattgacggaagacgggtctagatccagagggactgcgaacgacgctgatggcggggtttccatcagcgatccactacgaaatcgcccaagctcaagtcaggaaagcagaaatgtcccggagcaagtagacccggatggggaacttgtatgggagagtctatacggagcacagttgaggggagcgatgcgcacaactgacaggccgaggttgccaaaacttacgaaattctctgcagccgaacagctgtggattaaatcgaaggttgagaaagctcggctggagtgcgttagctacggcattgaacagcaatggctccgtgccagcgcagttctatatgccacgatcaagactgtagcggcttgtcgtccgtacaacaaggcccgcgaagctcacaaggtatggctcgagaacaaacgtgctgaagaaaagagagtacgaaggattattgggcgaattgagactgtacgcaccatgccgaaaggcaaacgaactgacaagcagatccgccttgcgcggaagattaacaggttgaaacgtgtcagcttcccagagatggactggcacggattcctgaatcactttaaagctaagttagatcttcttaaaaagttgatctcagttcgggtggcagaacatgagcggaagattagtcggaagatagcaggtacatacggcaaaagtgtatccggtcagtcagggtttacgccggatgtcgttgccgcaacgactttctggtcaggccttgcacagcctggaccaaagaaatttaaaaagaactcgctgatcttccagacttggaaagacagtgtagttgagaatatgaacactgagccagtactgctacacccgctgatcatagaatgtatgaataagcccagtccgttcaaggccactggccctgacgggattttcaactcctattggaggcaaggattcattgcgaattgggttaagtcgctaatccagcgaactattcaaacaggagagttcccggcctcacttatgtgtggtcgtacggtgctcctgtataagaatggtgacactgctaagccggagaattatcgacctatcacatgcctgaatggttgcttcaagatgactaatgctgttatcacgaaagtaatcgttcaacgggttcaagacacctgtgctctcccgggagaacagatggccctgaagccgaaggtgtgggcgtgcatggaagcgcagttgcgcgaccaggctctacagtctgagatcggtaacgattgtaagactgcgtggatcgatttttcaaaagcttatgacagtctggaccacgacgcgatccgattcgtgatagaaacacttgctttaccggacggaatggagaaatatctcctgaagtcgctagagagttggaagacaaaactggtgcttagtaatcgaggtaaagttgccactgggcgaccttacaagattaagagaggtgttctgcaaggtgacagtcttagtccggccctatttgtcattgcgacaagtcctatcgtctcccatctaaagcgtgtttgcccatccggccgtatacaattgtatatggatgacattaaactgtatggcaaatcagagaccgaattacgtatgctcattaaagaagttcaaaaggtagccaacaaattggggctccagatgaatctaaaaaaatgtagtacctatggtgctggcctaacagagagtatcgccgggtttgacccactcggcgacagagcatacaagtatctcggagttccccagcggagcgtcgcagatactaatttggcctttggtgagcttgaaggcaaggtaatacggtccatcgaggaaacgatggcgtgcgaatacttgacaatgcggcaggtggtcacaagattgaactctgtgatcggtcctcttgtccggtttgtagcacagtccgtactaaccagtcaggcgaaagtaagctggatatataacaaaatatcggatctggatagcaagataagagcgaaattagctcaaacaggcctaaggtacaagaaaagcaacgtagcaagactctacctaagcaagagtaaaaatggcatcggtttggtgaatgtccagcaggtattagttgaagcattggtgagccgagccatctattgtctgagagccccgagtctcgttgagattcgggagcatatactaacagcagagttcgaccctgtaggagctgctcgtaccgtgctgcggaggagtaggatccaactggagatcgagcgcgtcgaaatggcttcggctatatcggcgattaaaacaaattaccaggcaagatggatgacgaagttcacccaatcgaaactataccagaagtgggttcaccatgacatcgatctagccaactcaaacttatggttagagaggggcgaaatctctccgcaaaacgcaaggattgcggtagcggctcaagataatacgttactgtgtcgcgggtttgtaggtaatcgggagtcagaaaaacagtgccgcatgtgtaacatgggcattgagacctgcagtcatatcctgactgaatgtagttatcaccgggcgcatatgtatatagaacgtcacgattctgtggcaaggaatatctatgctgtcctggcaaaagaccacggtctctggattccgcattactcgcagcccgtgagttcggtaacaaagacgccgacgtgtgaactttactggaattacaagtttccatgtacccgtgcattggaagcttgccgtccagatatcgttctcatcgatcgcgcgaaaagaactatcctcatagtggaagttgcggtgtcgtatgtcacacggctaaagcagatggtgtcacgaaaagtgtataaatatggagtaaacggtgaaaagggagccgacggcgaaagccgcggctggaatatgatccgtgaactatctgaagtttataatatgaaagtgaacctttgcgcagtcgtgattggggcgagtggggaagttctcccttgtacggtcaaagccattcagagcatatctagcaagacctccagccgacagctcctagagcggtgccagcgtagcgctgtcctagggtcgacgagggttgtcaaacgacatcttgcagaattccattgagaccacccatgcgcagagtatccgaatcagtgaaagtccaagtttcaggacagaaacgtcagataagtccaagagaaacgagaaaacaagttcaagtatgcaagagttaatcaataagagagtaccgtaaatgtatgacccccccctttgccaagtcgacaactgtcatgcaggtgtctctcttttcacccgccatatggaccaaacgctatccagcctcgctcagaagagccttagggctggggagtaccacatgtggcggaaactgaatctggatgcgatgcataccgggagcgcagcgaaatcacttaacgctggtgcacctcctgctatcgtagtacttcctagatagatgagtagggtgggctaaaggtagtcgtcttcaatggcaataccgaggggtctcgtgacaggtgagggataactagtatcagataatatcagtcatgaaattagcaacaaccaacgtcaccgtcgttggcaaaacaccgactaacgatgctagttagaaagagtcgggtcttcccaaagttaggtgcttgcaccgaagccgatccgctctacccacagctctgcccagcgtt

SEQ ID NO: 1136 - DNA, 5688 bp, Bursaphelenchus xylophilus
  source 1..5688: mol_type = unassigned DNA
tgccagcggtgttgattaggtccaagttctttggccaaagatccgccctcggtttagcagtaccgaacgagtataccttcaagtggtggcactgaattagactgaatactctgaactgtagacttttgtgcaactgtgtatggtgtggaagacttgtttgtaccactatcagctttattggggctcgttactgtttcatacaggtagatgtcccctttagagatttccctgcagtttgcgctccaagtcgctagcctcttgcgtgtagtcaaaggaatacattcgccgtcggtgacagggctatacccggcgactacggacttgtttattacgtagtgcagcctcgtttaagacgaatgtgaaaagaaggtgtgattactaagcgttatgagtcgggttatctggaaactccgccccgccgcaatggcttcaagggtcaaactgctaacattttaaaccaatatttggcagcagcagactatgatgtcagagtgccgggggtctatcgatataagactgaaagcgatagacgtggagtgaaaggattccctttgttaagagaatcggtagaattcactttttacttattcaagaacttaacagcaacaagcactcgcgaggattaccgccccagattcggtcggcggtacttcacctgctttcttccactttcggaatctggcatcctggctttcagtgtggtgatggccggcttgagttttcttgagtcgtgcgagtgcctcatctgggacgtccggaccgattgatggagtctgcagtggacgaggacttgatggaccgtaaccatagtatatccctcatgcgtcttctcgactcgagggggtagcttgcactacccacccttctcttctccgattgggatttagacctagccctctggtgtgtctcgacccgcgatatcagattcctgaatcgactgtgagaaatgtctacgcgcaaagatcgacccattgccacccggctatgtggatcgggctcttgactgcttatctccggctttaatcgcttgaggaaaggggggtgtcgcccgaaagggttacgcgatcatccgattcctaccgtaaaaacgtagttgaagtaggattgaacctgagtaccaagtgaaaagagtggctataatgctccatggtataccctagggataaccgtgtcgagcgcactgctcaataccctgatttgttagtgtaggtatgtctagtggctgcctaggcagattcgcctattcactacgtaaaatctgggtgagtaccataagaacctcctgtagggccaggagtcaaactagtccaggttcggtatgcttcggtatactctctcacgggctagtcacctaagagttaagaaccgcctttttctgcactgtgaatagaaaaagaagggcgggagaatatacgggcgaggtaagcacgtcggaacggggtgtgcccaactcgtaccgtacgcccggacaaggaccatctttcgtaccccgttcacccggcacaagtccgattgtctctcccgagaggcgtcggcggaggttggctaacgccgtctctccaaccatcggtttgggtttaagtaacgccccagtggccggtagccaaactgatggaggcagaaatgccggtccgttgctaaatgcgggaacggaccaaaacgccggtgtggtggatacaggtggaagagtcttttggtctacgcaagaaaagaccaggctcaagtacgaatacgaccgtcttcgtgaacgacgccgtcgagacaaagttcgaaatcctacggtcgataaggccatggaaatcctttgggaagatctccggttgaaaattgaagataggtacggtgtcacattgccgcaaagaagcgcaagctctttgaaaaaccagtaccccaaagttattctgcgggggctcccagattcgggcctgccttgggcgggggttcaggtaaatgatactggacaagtcgtagtcgtagaccatgctgaggcggctacccttcgggggtccagcccagcagcggtcgacggggaggccgaagaaccggtagtacccccgttacccgcggcagaggtcgttgaatcggctgctgacgctgcggtgcccgatccgcaaagcgagatcgtggctgaccagggtgtggagacacgccctgtcgagaacccccccgctaatagccgggagactgaaacggaacccgtagaggtagagccttacctcgaagggcagtataaattcttcgtttctaagatccttgggaaatcgatgtggcggaagcctatcaaatacccgaggagagtcccggaaaccctgtggcgtcaagccaatgagttgattgagagatcgattcgacagggggaagtgtcgattcagagcctgaactgcatggtttatgctgctgggtgcgctgttaagtcttcgctggacaagaaggatcaggaagctaagcggcgtgaatccgagtggtatgcgtgtaggaaggccgagattaaggcactcgagaggtatctcaatttcattgacctggagttaaagcgtcgctctgcgtcgcggccgttgacatcaaggcaaaggcagaacttgggtgtgctcatcacgaagtatgggcgtgctcgggttaggtctggtgtccggctctcggaattgcaggcaatgttacgagacgccttagtgggaatccgaaagtgtatggcgaagcgctcggcagacaagaaacggaaacagggcaaatttgttcctattcaacgttacttagagcctagcagtgcggagcctcgactctctccagacacggttcgtgcatattggaatgacattgtgggatcttcccaacagtcaacgtcagattcgacgattcaagactggtcctccaatttaagcgttccgagtcaagagttgaacgcaagtaagatcatggggtggtggagagccgccgtttcgaagagcaagcccaacaaagctgctggtcctgatggtattcccggggtactgtggaaacgcttcaggtcggctagtgagtgggtttgtacctggttatatcgcttattacagaagcgaaggataatcacgccaagatggttgtctgttggtagagtcgtattgttaccaaagaaaggacctctcgaggatcccgccaactatagacccatcgcgtgcctgaacactgtatataagttgataacctcggtagtagaaatggcagttcgagagcagatccaggcttgtcctggactagtcccatacgagcagatagctaaccgtaaaggcgtatggggctgtacgcatgcgagtatcgtagaccgtatgataaccggtgcaagccgagaaggtaagggcggtgggtttccggacctacgcgtcctattttacgattgtaaaaaggccttcgacagcgtaaaccgagatcatatgttcgctgttttgagagtagcaaacgtgaacgttaaggtcgtgcatctactccacacactatctcagcaatggtgtgtccgatacgagctccgtcgaaacaaccgtgtggagagaagtagcccgctgagggtgaaaagaggactgctgcaaggcgacactctctctcctacatggttttgcctatgcatggctccaatatcagcctctattaaaacccttaaccctggcccaacccttcggccgaacatggggaatgggcgaaatagagggcaggtggcgatccaagttagtcatgtgttctacatggatgacttgaaagtgtattgcccccgcgtagccgatcaacgcagaatggaacagaatattccacagttgttcggtgaaattggactaagcataaatgcgagtaagagcgcagcagccgcagccgtgggaagatacgttgaatccgagttgccagttcttgggacgaaggatgagtacaagtacctgggaatagaaagcggttttgttgtaaatgaggtggccgcccttgacagaatgcaggccgttctgctaaaccgtgtagaagcgattctatcggttaaagaacatactgttggtcagaggcgcgacgctatacgagcgaaagcgatccctgggggggcctatatcctgggtcacatcattttgagtgacttggaccccaggggtgctgctgagcgcatgcgtcggttggatatcgagattcggcgtttagtcaaatcagctggtattcttcacgacaagtgtagtacagcgcgtattcaccttagctgtgaacagggaggtctagcttggccgtcgatggagagagcttattatgtagcagttgcatattcagcctcctatcttctgacaagtcaagacgaaactatcagtcgtgccagagactacttcgtctcgggtcgattgagtaacaagtttactgtttacaagcaccttacgagcatcgtagactcccttggtttatcggtagaactgccggatccgaatggacttcctaccggtcaaccgtccgtcctggctagaactattgcgagagcgatagatgccaagttggaagcgcagtggaaggaaactttgctaacttaccagcgcgcagggcgagtcgaaagggcagatccgacggtcgtggaccatgcaaactcataccattggttgagaaaagcatggataaacgagaaagcgtaccaacatgccgtgagtgttatggagggaactcttttggagggagtgaaccctcacggtgtgttgaccatgtgtagagcgtgtaaagctccaagtgcaagcattgctcacatcattactggctgcgccgaattgcgcaaaagccatatgaaggtgaggcatgatggagttactcgctggctatacaatgctctgactgaggtagatggtagcctaccgaagttccactatacgcaacagatcccggcagagatgaggggtgagcgactcactgtccgttacgactcggacatagttactcccaataaacctcgtcacaacagaccggatcttgttgtcttcgactctactagaaaggtgatttatatagtagaggtcagtgtaacgtggttgagtgtgttgcaaaagcaatacgataacaagctcaacaggtatgcagtgaacagtaatcacgagttcagtgagagcataccatatccgcctggtgtgaaccttgctaacgagataagggttttgtatcctcagtttactgggggtgtgaaggtattccctatgattatctcgccaacaggggaagtacacatgcaatttgtgccccaccttgcagagttactcgaaaatccgaacattcctcggattctagagaaaattcaacgctcggttgtgcttggtacagattacattatccggtcatacttcgccatgtaattaggcagtgctcctagcggagtgccgtgaagtggtgtcagtacccgtcgtgtggaaagcccaggagggttagtaccgacagtgggaaacccgctgcacgcaacctaaagacatttgcccttcgggggagaggtatgagaccacactagtcatggttgcttgcgcaagcatgactcattcattgtaagttcgtattatgaggcctcgcggaatgcgaaagtccaagagcgccaacttgtctctttgggaggttcctccgggttccttagggttggcgtaccatgcttcgtgtgagacctaggccgcttggacctagagttaagctgttgcatgtttgaggatgccttaggcggacgccatg

SEQ ID NO: 1137 - DNA, 4686 bp, Ascaris lumbricoides
  source 1..4686: mol_type = unassigned DNA
ggggccggtgggtttactcacttctgacccaccaccaacggaacgagggaaagcagagctggggccctcttccgattggcatggaaccgacctccacgtggtggccctgggcaacggaattcaagagaggatttaatcctctctatcatttgcaagatggatgagatcgaggtatccggcaaacaggttccaagtgagcacctttcccatagctgggaatatgggttaggcgtcctctgacatataagaggaatcagactcgttcgcgcccggtcattaacatcgatcagcgggagggccggactgaagtaaatttcctgttggcccgagtgcaggtggagctcggacccgaaaaacgatccctaagaggaccacaacccgaagggatggacgcagtcgccccggcacgtttggtgttggttatcctggagtgttgtgggacgaatagctatgccttgttcaactaactctttttttgaacgagggacccctgagccccatcgtgagccaatctcagggactgactcttcggagtccttaggtatgggtacccaccgttcacctcggctaaatgatgacgaggtgataaacggccccaagggtcacgaaagtgacccggttcatgtagtgcgtgcgcctcgaacgctacacccgaggcgattggaactcccaatcggagtaaataatctcggagaagcctctcaactacggcaagattcagcaatagctgaggaagcccaattggagagcaccgagaaccatgatggacgtcgccctcctttgagaggcggcaggaagctctggagtgaaaaggagatcgccacattaaggagattgtgtgaggcctatggaaataggcaggtatgctggaaagaggttcagaggaagtttgcggacttccacgaggaaagaacagtggctgcgttagccacgaagtggggggctcttaaacgcccgagagctccgatggttggtgcgccaccgactcctgatcatgatccagagcgtggaccagcgggcgagggagatggaggtacaacctcgcaagagaatgtgcctaccgatgatccaatacccgcgaacggcccgacagagggcaaggaatcggatgtgagaccagccgtggcctgtaggtgcacggaaccggaggagcaactgatggagtcggatgtgagaccgcctgcagtcgtaagacttgcagatccggagcagcatacgatgaagtcgggtgtgaaaccggttgcacttgacgggtcagcggatctggaggagcgtccgaaagagaaggatatcgagcagatgggtgttgactttgaaggggaaccgaggtttcgtgcctttcggaaagccttttacgggtatttcagatgggctgtcaactcgtttgatagggaacctgtcaagcgagttaggcgggactgtcccaaggtattttacgcttatgcggattaccttatcgcaaccggaagttctaaggcgttgggaccgaatcaatccaggattggtcgcttgaacggattggtctatgcggcagctagaacaatccaccaattctggagagaagaggtaggccatcgtcagcaaggcgagaagggatggtacacgaaaaccaaggcaacccgtgaagaccttcagatgctcatctctatgatggaatctgaacttgcaagaagaaaggagaagaggaagcccggcgcgaaagagctggagaatatccataagctagttgcaagacttggaacgcgcagcacatcgggcatcgtcagaaggctggagatgacaagacagaggctcaaactgttggaagacagaataagtttgcatgagcaagagaagaggcggaaacgattgcgcaagcaatttgcggaaaccccttctctaaaattactcacaaaaggagccaaggataggggcgatacgatggtaaccatgaaatctgtaatggacttctggagaccaataattggcagacgagttacctccaatccggaccaattgcaagtcttgagagactggagagatgagcagaagaaggcttatccggcagacctggatttagaaaaggccgatcttgaggagaaatatgagggagcaatcaggagaatccaaccgtggaaagctcccggtcccgacggattacatgcccactggtggaaagctttaccgtcggccaagaggctactgggtgaactggtggttgattggctgacaacaggtaaggttaccactggctggatgtgccgagggaggacaatcctgatccctaagaagggtgataggggcgacccttctaattaccgacctataacatgtttaaatacatgttataaggtgctaacatcggtaatgaattcagtcattctgagtcacctgagcagaggcgaagctttaccaatgaaccagcgagcaatgcggaaacgcgagtggggttgcacccacgctatggtccttgacagggccatggtaatggatgcaatggctcaaaagaaacactcattaagtgtggcctggcttgactatcgtaaagcatacgatagtgtgtcgcatgaatatattcgctgggcgattaactccgtgaatataccccggagtgttcagctgacgctcaagaggctcatgagtgactgggagacacgctttgagtcgacgcaatgccggccgaagttaaggtctgacaaaatgaaagtgctgaatggcatctttcaaggtgactcgttatcaccaaccctttttgtattatgcatagcacctatcagctacgcactcaataagggtgtcggccagtgtcaatcctcatccggctggagtgcaggttacggttttgagattggacatcagttctatatggacgatcttaaactgtacgctaggacgcctgcgatgctagactcccaaatccaggtggtgtctgaggtgtcggaagcaatgggactccatttgaatttgagtaaatgtgcgaaagcacattatgctccgcatggggcgggcggagcgcaagaagctgtggaaggtgcagaaggatcgaggaagggagaaatcccgatactcgggcttcgaagcacctataaatatcttggagtggaacaacgactccttccgatggaagtagccctcaaagagttcgaggataagtttatggatcgagcagaaacaatcttcgctagcgaactcacatgggggcagatggccacagcgtataatactatagctatcgctggtctacgatacgtctatagtaatacaaatggagcatcaccaaagcttctagaagccctgaaaagggcggccaccttagacacgcggataagagatcttttgaggcgacataaatgtcggtttcgaaatagctttgtcgagaggctgtatatccctagagaatgcggtggatacgggttaaaatcagtggaggatacgctgcgagagagtatcctcgctacgtggagttacatcgccacgaacccgcatttggctggacaacagtatttcttcgagaggcttgcagcaagaggcaagcgcaccccgatggcggacggggtaaagatattgttggatctgggagtggaaccccaggtggacttgaagcgaaggacggtgaccgtcgacggtatagtcttcgaagacccgaccaagcttcatcgatacctggtgggaaagctcttaaaagcaagaactgaggcgaggattcgaagatggaaggaagccagcttagctggacggttggtaaatgacacaagtattgatatgcgactatcatgcttgtggatgaaaaaaggttttgtgagtgcgaggaacctcagagatgcgcttgctgtgcaagaggggagtttgcttactagagcatgccctgctctaaagggtaaaggcggccaagaagtttgccggtgttgccatgcagcgccggaaactgcagagcacataacatcagcctgccgctattggcttccaagtctctacgttgagagacatgactcggtagcaaggaacctctattacgtcatatgctgccgctacggcataacaccggtgcattactcaaatagggtatcaccgctctcggagaatagccaatgccgcgttctttggaacatggatatgcagactcggacgccaatgaagcatcgaaagcctgatatagtcgtctttgatctcaagagggaaaagatcctcatgttcgaagtttcgatagcccatgccagcgggttattgaaacagcgggaaatcaagatcaatcggtatacggtgaactccgaagagttgcctgatgagaccataacaccgtatccgcctgggccgaatttggccgctgacctcgctgccacctatggttggcaggttgaatttgccccagtggtggttggcacgtgtggtgagcacgtaccagccgtcaaagaggacctgcaaagaacgttggatctaaaacctcatcaagtcgaagcccttcttgaaaggatatcccgatcggcggtgatcggaacggctagagtagtccgagcacacctcgcctgctcctagtcgctaaggggtccggaaatggtccggtcctgcgctacccggttctggtagcacgttcaagcgctcaatcgcctgccttgtaggcagtccatctgtggaagtcgcgctcttgatacagatgtggacggatggaagcagatgatagagccggtgacggccctactagccaaacgc

SEQ ID NO: 1138 - DNA, 4364 bp, Heliconius melpomene
  source 1..4364: mol_type = unassigned DNA
ataaataataataataataataataataagccccctaaaatccaaccatacgtccgagtcgaacatctgattctcgtggggggcggacacgtgaaaataaattacttacacggctaacatggctctggtaaccctttttatggagaatatggaaaataaaagatataatttgcggccgctacccgggggtcgccggggcgcatctggagctaacgctggatgccacagcatgcgaaccgttggcgacgggggactgagcaggcgggttcccctcgaaaaaaatgttacagccgaacaatcatcctcaccactcacttcttcttcctctcattcaccggtatcaagcataccctcaccatcctcaactcgcaccctattaaattcccctaattcatcaccaacatcatcacattcatcactggttataaggtcagcagatgttgtgcaggaggcacttgccaattaccctgcacccactgcgggctctattcgtgcgcgaaaaaaatggaccgacataatgaaccgttatatttggcgcacatatcttattataacaaaatgcgaaaccacgttattgaataattatttagaacccctacatcaagaatttagtagtaaatttcccgaaatgcaggtaactagacaacgtataggagatcaacgtagagcaataataagaaataaactactatcagatgataccttagctcaaattttaattgaagtaaaagaactattacaaatcggtgatcaaccacttacacaaaataacattcattcaactcaactttcacactcaaacactagaataaaatggtcaaacgaacttaatgaagaaattgtcaaatgttactttgaagtcaccctacttgaagttaataagacttcttatcgtaaaaacctgtacagtttatttatatctagaaatccacacctatcacaccttacagaacaaagaatagctgaccaaagacgactaatatttatgaacaaaagtgtacacaacgatagaattattgaattaaaaagagaagtagaaattaaattagctaacagtaattctttaacaaaaaatattacagagtcaaattctcctagcagtcaaacaaatgaaataaatgattctgcatatgtacaaagtaatttacaacccgttgaaccactagaccaacattgtataaatagacacaatttaatagaaaaacattatgttgaacaagaatttaataatgctttaattcaatttaacaatacaaatcctgaaaccagaccctatataccaagacaaaagtcatcgcgtaaattttcccaaattgtcagtttcttaaatagtgaagtacttccaaaacatttaaataacgaattagatttcaatgctcttcataacattatatatacmgctgyctacactgcatctctgtgtaatggaacaaaattcagttttattgataattaccgacctcgtaacagcaagccatcgtggcaaagaagacttgaaagtagaatagacaaatatagattgcaaataggtagacttacacaatatatatcaggaaataggaaccgtaaaatattaaaaactgtagaagaaataaaaacacaatataaaattcattcacatcacgaagaacctaatacagaattaccacatttcttagacacactaaaacaaaaattaaatgcaacttcgaacagacttagaagatatttgacatgtacaaaacggaagcaacaaaataatacattcgttaataacgaaaaacatttttatagaactctatctagcacaaaccaaaataccacaacacaattacwagaacatccaacggaaaataatttgcaacaatactgggccaatatttgggaaacttcaatagaacayaatgcagacgcagaatggttaaataaaatacctgacktagaaataaatktaatgaaattcaaagatatatccatagaaacattcaatcaaatcatccagcgaacacacaattggaaggcaccgggaaccgataatatacacaactaytggtacaaaaagctaacatgcactcattcacttcttcttaaacacataaaccagttcatacaatcaccttgcacactacctttatttataacaaacggaataacgtatatgttaccgaaaggcttagatcccacaaacccagctaactataggccaataacatgcctccaaacgatatataaaattatcactgcgtgtattactgacataatttataaacatatcgatcaaaataacatattagctgaacaacagaaaggctgtaggaaaaatagtcaagggtgtaaagagcagcttactatagacgcaatagttatgaaacaggcacataataaaaatahtaatacratgtatatagactacagaaaagcatttgattcagttccacacagttggttactatatattttaaaaaagtacaagattcaccccattctaataacatttttaagctccgtyatgctctcatggaaaactagattaaaattgattaacaataatgaaacactgattactgattggattaaaatacaacgaggcatctttcaaggtgatgcgctgagtccattatggttctgtctagcgttaaaccctctctctgaattgcttaataataccaatacaggatttaaactaaaacataataacacatatcatataatttcacatttaatgtacatggacgatatcaaactatacgccagtaataataaagaactaaaaatactagccgacctcacacaatccttctctacagacatacgcatggaatttggaattgaaaaatgcaaggtacattcaattaaacgtggcaaatcacaacaaaatacatatatacttaacactggtgaacaaattgaatcaatggacgaaaatagcacgtataaataccttggatttcaacaagctaagcaaatacaacaaaaacaaaccaagatagaactaaccaataaatttaaatttcgtttgaatcaaattttaagatcacaattaaactcacgtaatattataaaagccatcaacacatacgcaataccgatccttacttactcttttgctataataaactggtctcaaactgatttatcgaatctgcaacgtataataaatacacacatgactacacataggaaacatcaccctaaatcatgtatccagcgtctaactatatcacgtctggatggaggacgaggtctcattgatattcgtaacctacataataatctagtgactaaattccgaaattacttttacgctaaggctgaaattagtgaactacacaaattcatagttaatatagataataaatatacaccacttaatttaaacgatagaaatatacaactaaatcaaactttgataactaagcagcaaaaaatagaagcatggtctttaaagtcactacacggtagacatctagccgatcttagccaaactcacgtcgacaaagttgcgtcgaacgaatggctacgacggggagatctcttcccagagacggaagccttcatgatggctattcaggaccaagtaatagacactaggaactatcaaaaacacatcataaaaagaccaaatatggtaaacgatttatgcagaagatgctattctagtcctgaaacaatccaacacattaccggagcctgtaaaaccatagtacaaaccgattacaaacatagacatgatcaggtcgctgcaattattcatcaacacctagcatttaaacattctctcatcacacaagcacaaaaaactccctattacaaatattcacctcaggctattttagaatctacaaattttaagctgtattgggatcgtacaatcatcacagataaaaccgtacactacaatagaccggatattttacttcatgataaagtwaaaawttctgtatacttgatagacatagccattccaaatacacacaatcttgcatccactttttcaaacaaaatagataagtatacagatttaaccatagagctcaaaagtcaatggaaagtccaatccgtcactacagtaccaatagttctttcaacaaccggagtagtacctcatacgctacacacgagtctggaaactttgggtattcaccggttaagttatattcttttacagaaagccgcaatcttaaatacatgccgtatagttaggaagtttttatcatcaaataattaacttattgtcagaattccttactagtaataataattatcgctgaaaatctccacccaaatattgcttggctatatgctcgcaatttttggttaacgtaccccaatgatttgggagaacaaaaatggtaaaactataataataataattatattaatat

SEQ ID NO: 1139 - DNA, 3621 bp, Takifugu rubripes
  source 1..3621: mol_type = unassigned DNA
  misc_difference 459: note = a, c, t, g, unknown or other
  misc_difference 520: note = a, c, t, g, unknown or other
  misc_difference 935: note = a, c, t, g, unknown or other
  misc_difference 1080: note = a, c, t, g, unknown or other
  misc_difference 1190: note = a, c, t, g, unknown or other
  misc_difference 2793: note = a, c, t, g, unknown or other
ttctatgcgccttatgcgactggataggccagtggtttacgccgctgactttggtgcggaaggttgtcggttcgaatccaggcgagcccttaggcaaggctccttacgcatatatgcctacacctcggtatgagcggaacmwtaactgatagagtcataccggctcggacgtcgcccgggtcaacaaggtccgcgtcaggggtcggggaaccagggccacctgatgtcaaattggctactggaacaaggcattcatggagcagggcagagaacgtggtactgatggagtgttactacgggagtaaccccagcgagagagggtacatgcagaggatgtgggagaaatgggtgcttcgaaaccccacatcctcactgactaagaagcagctcttagctcagtgttcgaatatccgcaataagaagctgctatcacagctagagattgacgaggcacggcgntgtgcctcacccacggtacaaatatgctacggcaagggggagccaggacgccaggtcagcntgggggtgatttcatcatcaccccccaatatcgagattgggtacaaagccccaatgacagacggactcggcacaagggcagctgacctgagagagagaatcatgaagtcctgggggaactcaactacctccctgccaaggctaacacacaaagtaccagaccaatctctactggaggacatgaacacggcactgtcaaccatccctaccactaccatcactgagaccaatcagctgatgtatgcagcggcaacagtaatcctacagatgcttggctataagatgaagagcatgaacagccagaaggagcaaatggccccatggaggagaaggctagaggcaaaaatcatggcgacacggagagaagtcagccttctaacagagctgagtagaggcgtgaatctaaggacagagcngcccaagaaatataacaaactgtccacaactgaggcactggagactgctaagcaaaggctcacagccctggctacccgactaaagaggtacacaagagaagtagaggcaaggagaataaacaaggtgttctccaccaatccagcnaaggtctactctcaatggcagggcaacaagatgacaacagacccccccagggctgagactgagcaatactggaagagtatctgggagaaagaggcaacgcacaacactantgcccaatggctgcaagacctacagacagagcacagccaacttccagaacaagacccagtagtcatcaccttagcagacatccaaacaagagtgtccaaaatgaagagctggacagcaccagggcccgataagatccacgcctactggcttaagaagctgactgcactccatgaacgcctggcagcacagatgaaccagctgctaacatcagggaaccacccagagtggctaacccagggccggacagtcctcataatgaaggacccccagaagggcacaataccatccaactaccggcccataacctgcctcagcaccacatggaagctcctatcaggcatcatagcggctaagatcagtaggcacatggatcaatacatgagcagagcacagaaaggcataggcaacaacaccagaggtgccaagcaccagctactggtcgacagggcaatcgcccaggactgtaggacgcggcacaccaacctgtgcactgcctggattgattacaagaaagcctatgactcaatgccgcacacatggatactggagtgcctaaagctgtataacatcaacaggacactaagagagttcatccagaactccatgaagctgtggaacacgactctggaggccaactcaaagccaattgcgcgggtgagcatcagatgcggcatatatcaaggagatgccctgtcccccctgctgttctgcataggcctaaaccccctcagccagatcatcacaaagagtggctatgggtaccagttccgaagtggaacaaccgtcagccacctcctctacatggatgacatcaagctgtatgccaagaacgagcgtgacatcgactccctgattcacctcactaggatctacagcaaagacatcgggatgtcattcggactagataaatgtgggcggatgatatctagaagaggaaaggtgatcgcaactgatggggttgaactacctgaagggaacatcacagatgtgcaggacagttacaaatacctggggatcccgcaggcaaatggtaaccatgaggaggcagctaggaggtcagccacagccaaatacctacagaggttaaggcaggtcctgaaaagtcagctgaatggtaagaataagatccaggccataaacacctacgccctgccagtaatcagataccctgctggcataataccctggccactggaagagatacaagccactgacatcaagacaaggaagctgaatggtaagcataagatccaggccataaacacctacgccctgccagtaatcagataccctgctggcataataccctggccactggaagagatacaagccactgacatcaagacaaggaagctcctcaccatgcacggagggtttcaccctaagtccagcgtcctgaggctgtacacgaagcgaaaggaagggggccgaggactagtaagtgtccgaactactgtccaggaggaaacaacaagcctccgagaatacatcaagaagatggcccccactgaccgactgctgagtgaatgcctcaggcaacaaaagcccaccaaggaggaggagcctgaggggctatcatggaaggacaagcccctgcatggnatgtaccaccgacaaattgaggaagtggctgatatcgagaaaacataccagtggctggaaaaggccggactgaaagacagcacagaggcactactcatggctgcacaagaacaggccctgagcaccagagcaatagaggccagggtctaccataccagacaagaccccaggtgcaggctgtgtggagacgcccctgagacagtccagcacatcacagcagggtgcaagatgttggcaggcaaggcatacatggagcggcataaccaggtggctggcatagtgtacaggaacatctgcactgagtatggactggaggtcccagggtccaggtgggagacacccccgaaagtgctggagaacaagcaggccaagatcctgtgggacttccagatccagactgacaagatggtggtggccaaccagcctgacatagtggtggtggataaacaccagaagacagtggtggtgatagatgtagcaatcccaagtgatagcaacatcaggaagaaggaacacgagaagctggagaagtaccaagggctgaaggaggagatggagagaatgtggggcatgaaggcaacagtggtcccagtagtgattgggacactaggggcagtaacacccaagctgagtagatggctccaacagataccaggaaccacatcagagatctctgtccagaagagcgcagtcctaggaacagctaagatcctgcgcagaaccctcagactcccaggcctctggtagaggacccgagtctgaaggaaggaggcaccgcccaggagggcgaggaagagatttttttttatatatatatatatatatata

SEQ ID NO: 1140 - DNA, 175 bp, Taeniopygia guttata
  source 1..175: mol_type = unassigned DNA
gtctagttacaactgggcatcgctgcagagatcgcacctcctcgtggtcccgctggtagcccttcgaagggtgactaagtcgatctctgccccaggtacggagccgttgggactcaccagtccaacgtaactcctgcctaaattcggtgaaacaaattcctcggtaaaaagcccc

SEQ ID NO: 1141 - DNA, 91 bp, Geospiza fortis
  source 1..91: mol_type = unassigned DNA
agacttaagtgagtttggttacaactgggcatagctgcagagaccgcgcctcctcgcggccccgctggtaagcccttaacagggtgactaa

SEQ ID NO: 1142 - DNA, 160 bp, Zonotrichia albicollis
  source 1..160: mol_type = unassigned DNA
cgacttgagaaggtctggttacaactgggcatagctgcagagatcgcgcctcctcgtggccccgctggtaagcccttaacagggtgactaagtcgatctctgccccagtccaggagccgctgggtttcaccagcccagcgattccttccaaattcggtga

SEQ ID NO: 1143 - DNA, 152 bp, Danio rerio
  source 1..152: mol_type = unassigned DNA
aatcccccctacccaatccccccgtcgtgacctccaggccaggaatcacgagcgtacgacagtggccatccggcaatgacaatagcgtgactaacgacaatgagtcagatccatgacccttggagtgggttaacctccgcctctttaaaaac

SEQ ID NO: 1144 - DNA, 500 bp, Gasterosteus aculeatus
  source 1..500: mol_type = unassigned DNA
catattggggtctcaggaggagacacagggtctgttgcggctccggtaaacggtaccggagtcggttaagcatcgtttgggcccgcctccacgtggtggtccgcggtaacaccaatagggtggctaagaggcccagtaatttccccgaattgtcttcccccccgcgcgggggggacccccctttagtgtcggagcggtcgcgcctccgcgtttggggtgtcgcaggcgtgagccttcgtccccttaagttcagacggtcccggcttcttgccgggccaacccccggtgcagcgttctcccatgttggatcggcacccagccccgggtgccatgcgagttcagacattttgtttatgtatcgtctgcgtggttgacttgctaagctcatttcctcctctcactgcgtccccccaggtgctgatcggttgaagaggattcgtcgttgacctcggcggtgaatttgggattgtattatacaggtaggtatagagggcgtgcgg

SEQ ID NO: 1145 - DNA, 595 bp, Bombyx mori
  source 1..595: mol_type = unassigned DNA
gggcgatacgcataattttaatttcccgattgaaatccagtcgtcttaatctggtgaccagtggcgcggtcaccagtatagtgcacaggacgtgaatggctccgaggctggcggagtcactcactataagtgtgagagacgatgtcctgtgccaagtatacgtccaaccctaacgggttaagtgaaattagttgctcataacagggacggtgtacctgtttgctcgtggctggctatcgaatggacgggaccaatacacccccctgttagtaatggggtaagagagagcggtctgaaactatggccgaaatcacgacgccccactcctacccataacctgcacgtggtaccgccgcacattgaccgatacgggaggaggggcagcacttgaatcacgtagtcttggtgtagccattgcgggactacagccctcgtaagtgccgccttagaacgcaacggggcaataggtgggccggggcgctagcgggggggagtaatctcccctgttggcgtgcaccgcactgctcccactgggggcagtgtcatccggaaacaggtgggccggggcgccaccaggggggagcaatccctcctg

SEQ ID NO: 1146 - DNA, 337 bp, Hydra vulgaris
  source 1..337: mol_type = unassigned DNA
ttcaagtggatgaagctgggaaggtaatctgtagttggttgagttggttgcagattactgctgtcgattttgctttctattgaaagcctgtctctacgggtcctgaagcttgaattttggtagctatagttttgtgggaggaaagtggaattttgtaccatcttttgtctctcgtatctactatagtaaatccggtcatgcagcctctacgcggcgcaactagaaacttggatcagtgatcaaggctaatgcatgccgggtctcctcagattaggagtataatacaaatctgacttcatcactaagaggctatggggctaacgatcctatagtctcg

SEQ ID NO: 1147 - DNA, 265 bp, Hydra vulgaris
  source 1..265: mol_type = unassigned DNA
cttggggtcactgacacatttttcggtagccatagttttttgagaggaagagtggaagtttttccatgagtcgtctctcgtataaactgtggtaaatccggccatccagcctctacgcggcgcaactagaaacttggatcagtgatcaaggctaatggatgacgggactccatggataaggagatataaagatcttatttgaacgcatcttaaggggttatggggctaacacccccttaattctggtgcacatttattgaccgtt

SEQ ID NO: 1148 - DNA, 569 bp, Adineta vaga
  source 1..569: mol_type = unassigned DNA
gaaatagtttgcaatggtaggtgtatggcgcctctgtgtctctctttcgctggatatagtttgacgattttgtaccaggtatctgtttcttgtgagttcagcaccagtttgaacaggcttagcgatagaccttcgaacttgaaacactgttgtgaagctggctgggcccctgcagattttctcgattagaacgtgagtgttacgtccagaatgacccaccagtggttagttctacgttgccctggaaaggagaaaagttgagctaaaatcgcacggcctagttgtttatcaaataggcacggtgaggaactcttctatgtaccctgactaaagtactcacttgtgcgctgggtttgctccccctcgcattgacttatctgatcgcactacccaccaaacgaaacataaacttagctcgtggtatcagtccacagcgtgtgcagtcggattcaggggagcgtgttagtgacaagcaggataatattaacatagttaatgttaaggcgttcaacattccttatccaattggaagagttgactgtgaagtttgtcatgaagacattggacaa

SEQ ID NO: 1149 - DNA, 265 bp, Oryzias latipes
  source 1..265: mol_type = unassigned DNA
cgcacaggggacacagagcctgcccaagtaccgctcccgagggagcgggaaacgggggggtgactatcccctggggtccggcgagagcgctggtctacggaccaggggtggctgtgggcaggctgctcctcaggccagttgattagttacgcatgggctgtacctccacgtggtcccgctggtaacgacttgtcggctaaatcagcccgcccaccatctgggatatggttgaccgtctaaccccagtactcaggtcacaaacaaa

SEQ ID NO: 1150 - DNA, 840 bp, Limulus polyphemus
  source 1..840: mol_type = unassigned DNA
tgggaggagacccaaactatcctaggatggggcggaaccgaccatatgagccatattaacattgcccacactatcctctggaggtacctcctcgtggtacggctggatataggtaaatcctgtaaccaaatcctccaacccgtgaaggagaacactaaaacccatatagtggcctcgccaaccactatatgtccaacggcaggagaagctatctcccggatgggaaggaaaaccctaaaccgtgatgggaacttaccggccccatcagctattgggtacccggtagggacttgcaaccctaccctgtatttgcattttatagggaaccggtcggccctatatcagagtagaccgtttattaaatatgggtgaaaatattaacagtaaaagctatggtttggcgtccgtgtggtgccagggcggcggccaaacccgagctacttggcaccaactggggatggtagcttccgagcgattccctggcgacgtgggaccgatcgacgatggagtccaaacatccggaatagaggaattgagaaatacctattccaccaccggctcacatacccaaggtgaacccggtgcaactagagtacaacctatctgtggcggtaggtgccgaaccactcaggtgacgggcttgtttattgatgtctccctacgagacacgaattgtgacaaatccactccggtggacaattacccgatctatgaacctgttaccgatattagacaagaaaataaagaactgacaacgcctagagcttcaggcagcatgtctgtaagtatccagtcatcgagcgtgactgagggcgaaattgataataactctgaaactga

SEQ ID NO: 1151 - DNA, 394 bp, Caenorhabditis elegans
  source 1..394: mol_type = unassigned DNA
gctcactttctatcgtgttaaccgtacgtttacactcccagtgagtgtaataaaggttattcgatagagggtgtctccctctttcttgggtaattcttcggcggtccggggtctctccctcgtcttttttttaaacttttctttctcatccactcttttgctcctttttactaactcttgtactctatagtcttttctcatcccccatccgccgttgggcaaagtttatttactttgttaaatccatattttatctctctcacccgtacagaaagcgtctccttctcaaacgcttttctgtactttttcttatattttcattaacatatttttcctgtttatactaacctaacctccattgtcaattactaactaacttgtacaacggatttcg

SEQ ID NO: 1152 - DNA, 69 bp, Cryptococcus neoformans
  source 1..69: mol_type = unassigned DNA
ccctcttaataccccataacacataacaaccccctaatcaacgttctctgcaccttaaacaccaccaac

SEQ ID NO: 1153 - DNA, 102 bp, Chondrus crispus
  source 1..102: mol_type = unassigned DNA
acgccccctatccatttctgccagcctcccatcggctcgccgtctccgcaacccctcttcctcggctgtaccagttccgctcccacaacctccctcgccaca

SEQ ID NO: 1154 - DNA, 74 bp, Chondrus crispus
  source 1..74: mol_type = unassigned DNA
  misc_difference 2: note = a, c, t, g, unknown or other
cnccagccamcgatcccgccgccactcgcmgcccggccgtctcgaccgccacctccccgasgccccagcccatc

SEQ ID NO: 1155 - DNA, 714 bp, Acanthamoeba castellanii
  source 1..714: mol_type = unassigned DNA
taaccctaaccctctccctcggcccctctaccctaaagcgccctaatcgaccggcgacgccctaatcgctaccctctacgccctaatcgactttggcgccaaagcgactttccccggccgattttcttcctgcctttttcttttctctccaagcgacgcgccttttactttgccgccgttctgttttttcttttctctttgcacttcgcttctacttcacacctcctcctcctccttctcgacccgcgcggcctcgagcgacttgctgcagcggctcccggcctcccccacgcggcctgctactcccgctttctagacgcccccggtcttgctctcagtctcccgcatcgaagcggtagtcggggtacgtgctcaagtgactcaagcctcttttcagcctcggcgctctctcaatccgcctcagtcttagcctttcaagttgctcgattacgctctcgaatcgctctctctctcagtctcagtctcagtctcaatctcgatcttgccttcgccttcgtctcgacgccttgctctcgwaatcgctgccactacgtgccagctttttcgtgccttgtcttcgtgtcgacccggaccgtttgcaagccctcgccttcgtaccccgctctcgtagccgttctcatcgctgaagcgttctacgcgctggcagcaagcctcggccctagcttgtagcgccgccggtggccgctcgccaac

SEQ ID NO: 1156 - DNA, 200 bp, Fragilariopsis cylindrus
  source 1..200: mol_type = unassigned DNA
atcaatctaatactgaaggcaataccaaactcaacccgaaatcaaaatcgttagaatcaatatacgacccccgctgctgtacatgtccagccggatctcgttgtaaagaagattgcagctgtaaaaaagttggacttctttgttcttcctgtgaagaagttgattgtggctgttcaaattcttttcataataaagaatta

SEQ ID NO: 1157 - DNA, 832 bp, Hydra vulgaris
  source 1..832: mol_type = unassigned DNA
tttctaatgttacgtgatatgatatggttagttcatggttagtttatgtttatgcttagtttatggaaaatcgtttatttatggcacaatattgtttgctgtttttaaatttatgtaacgtgtgcatttgatgtatattcttgaactttttaatctgaatttttacttggtttaatacgtttattatattcttcgattgagcaatttatcctatcaaagcaatttatccttcgattcgagcaatttatccttcgattcgagcaatttatccttcgattgagcaatttatcctatcaaaattagcatatatactgcaattttcaaataatctacgaaataagttcacttactgaaaatcattaagtaaaagaagaaaggaagaaaaaataaaaataaaaagtagtaaatcctttcataacaataatcattctattattaaatttaaaggaatattttggttttgtactaaatcatgcgttcatatttcaccgaagaagggggctgctatatttttgtttgaagttgtttatcttaaaactttaaacttgtgttcaaccaaccgtaaacattagttcgctgttcgctcaaattatctacaatataaaatttatcaatcttttttcgttacggtaaacaataaacaataaaataactatagttattttattgtttaccgcatattgtttaactatagttaaacaaagtatttgtttatggaacattaccagtatctcttgttaaggtaaacaacaaaacatagacggcatctctttttaaggtaattaagtatacggctaataataaaaatatacagctaataataaaatcttca

SEQ ID NO: 1158 - DNA, 258 bp, Lactuca sativa
  source 1..258: mol_type = unassigned DNA
acattaaattagagaggttgatgtttcaatggaagaagatgaaattccaagaagctatttttgttgcccaccaagtgtttgataaaatgtccaaactaatttttctcttgttgcagctttattgttcaagataatgtagtttgcttagtttgagcgttccttgtgcacaccaacagtgtgttggtgtgccatttcctttccttcctttttaactattgcttcatagcttaagcttcatctcgaggcttgttctcttgt

SEQ ID NO: 1159 - DNA, 122 bp, Monosiga brevicollis
  source 1..122: mol_type = unassigned DNA
catcttggcgtgaaccacgttgtcagacaaaatctgcaaccccgctctttgcggcccgcgttttggcggcgccctcgctcccaccgtgtccgctcgcttgctcgcttgcttgccccgcggac

SEQ ID NO: 1160 - DNA, 453 bp, Hydra vulgaris
  source 1..453: mol_type = unassigned DNA
aatttaaaaaaaaaaaatcgtttatttatggcataatactgtttgtaatttttgaaaattcgtgcaacaactgcagttaaattgaagagctgaaatttaagatctgagcttttcaatcagagttttttaccctaaaacattaaattttatcataacaaaaatcgttctaatattattaaacttaaagaaattcgttcttatatcaaatcttatttcagtgtttcacagacgaagggttttactagatttttattttttcaacttttgaatttgtttattataaaactgtaaactagtgtgcaaccaaccgtaaaaawtagttagctgttcacccaaaatattattcagtatgaaaatatttaatcttctttattcgcagtaaacaataaaatatctagttaaacaaaatatttcttaataataaaaaacaaaaactttttcttaacaagtaca

SEQ ID NO: 1161 - DNA, 1461 bp, Magnaporthe oryzae
  source 1..1461: mol_type = unassigned DNA
cccgaacccgaacccaaacccaaacccaaacccaaacccaaacccaaacccaaacccaaacccggagggttcccaagtcgcctaaacccgaagggtttaggatattatttcgtttattagaattggataattatttacccctgttggacaggggggttgcaggggttaaattaaggttttttattatttatgcgccgtttatttgtttacccccccaaatattataaaagcgcgttccatcctcttaggaaaagcgaagcttttccttgtaaaagtcgctagacttttactataaaagtcgctagacttttataccaatcttttaacaaaaagcgtagctttttgttgccaatctattaaaaaaagcggagctttttttaactttttcttttttttttttttttcttttttttttttttttttcttttttttttttttttttttttatatatattattattattattattagcggtggggctatttatgcgctttaatttgtgcggggctatttatgcgctttaatttgtgcggggctattaatgcgctttaactttacaaattttatttatgcgctttaattgctgcgggcctgttaatgcgctttaatttacaaatttcattaatgcgctttaacttttatatttactaatgcgttatttatataattgctattattatcgttgctattattattattgctattattatcgttattattattgcaattttattatataaaccctcgtttgtccctcgatttatcccgtttcttttccatcccatcgcgcgttttcgtaagctttggttttcgtaggatttgctttcgtaggctttgctttcgtaggctttcgtcagcttttacctgcttttattttttctttttctttttattccccccccttttttttacctggtttattagcggtttacctgcttttattacctggttcccctttacctgttttattagcggtttacctgcttttattacctggttcccctttacctactttataagcggtttacctgcttttattacctggttcccctttacctgttttattagcggtttacctgcttttattacctggttcccctttacctgttttattagcggtttaccagcttttattacctggttcccctttacctactttattagcggtttacccgtttctattagtgggcatttatttcccgtttttattagcagttaaatttacccttttaaggttatttacctgcttttattcacagggcacccctgtttttactagcagttaaatttacctttttaaggttatttacctgcttttattcacagggcacccctgtttttaccagcagttaaatttacctttttaaggttatttacctgcttttattaacaaccctttattttttcctattaacgggtatttatttacctgttttattggaattcacccgttggacggc

SEQ ID NO: 1162 - DNA, 278 bp, Branchiostoma floridae
  source 1..278: mol_type = unassigned DNA
ttttcagtctggctcagccagtgaccgccgggaaagtccggctgactaccacgaatagggtggtgacagctggatagacagacgacagctcggaaagacggcattggggcagtatgggttggcacccctaactgcatctcccctaggagagcatcccgcaacacgctacaaagaaccacaaagagcaatacccccagggatgcccgagagggggggaggatgagcatcccattcggacggtccaatcggtattgaccccagcaaacggagaatcgaca

SEQ ID NO: 1163 - DNA, 251 bp, Danio rerio
  source 1..251: mol_type = unassigned DNA
ttcaagcctggcgcagccagtgactcctaggaatagactaggtggcaaccaagaatagtttggtcgactactggagagacagttgacggcacggaaagacggcacttgggacagtatgggttagcaccccagcctgtgtctttcgtgagagagaacccaaacaagctacggaaagccccacagagatatacccccaggagatcccgagagggggggaggatgagatctccaatcggacggatcaaaggtta

SEQ ID NO: 1164 - DNA, 214 bp, Branchiostoma floridae
  source 1..214: mol_type = unassigned DNA
ctgaccagcagacgggaagcccgcgaccaactagtctccgcaaatattgcacacagggcgaccctatggagctgattcagtcaaatttcctctgagatataccgataactatctacagaaactgcacagttagtttggaaagagcttttctactgaaagacagcaaaatccgccactttagacgagcgtcaagactgccctccccataaccaat

SEQ ID NO: 1165 - DNA, 12 bp, Danio rerio
  source 1..12: mol_type = unassigned DNA
aaagcagtagag

SEQ ID NO: 1166 - DNA, 217 bp, Takifugu rubripes
  source 1..217: mol_type = unassigned DNA
agactaggtgacaaccaagaacagttwggtcgactactggaaagacagttggcagctcggaaagacggcacccgggacagtatgggttagcaccccagcctgtatctttcgcgagaaggaacccaaacaagctacggaaagccctacagagaaacacccccaggagatcccgagagggggggaggatgagatctccaatcggacggacctaacgtta

SEQ ID NO: 1167 - DNA, 247 bp, Tetraodon nigroviridis
  source 1..247: mol_type = unassigned DNA
agattggtctggctaagccagtgacgtccaggaacagactggctgacgaccacgaatagagtggtgacagcttggatagacagctgacagcagggaaagacggcaaccggggcaggaagggctagcaacccagcctgcatcttccgtgaggaagaacccaaaacttgctacgaagagcccgaagcaaagatacccccaggggagcccgagagggggggagaatgagctccccaaacggacggataac

SEQ ID NO: 1168 - DNA, 227 bp, Schmidtea mediterranea
  source 1..227: mol_type = unassigned DNA
aaacgacatcatgaacgcttggccgcaacaatccagttatccctgcggtaacattgtggaactcataagacaagtactaaaagaagaattagaaaaattagaagaaaaaattgaaaataatttatttataaaatttaaaaatttaaataaatttaaaaatttaaatttaaatttaaatgaagataaaaatttatttaatccaataaataatcaagaaaatcaagaaa

SEQ ID NO: 1169 - DNA, 74 bp, Caenorhabditis brenneri
  source 1..74: mol_type = unassigned DNA
aaggacgctggtttaaggccgaattcgttcgttctttttctggcggtcttgctttgagcttggtttccgatcct

SEQ ID NO: 1170 - DNA, 815 bp, Caenorhabditis japonica
  source 1..815: mol_type = unassigned DNA
gcgccccgggttacattgtcggggccacctttctcttggagtagagtacagtctactaattttttgataagctagtcgggtccgaaccactagagtttgcttgaaaatgcgtcaaaccagcattttagaactcgcccaaaagttcggccccgacccccaaacaaatgggaccttcttgacgattttccctgaaaatcggaggatggaatggtcccctattcttgtaaatagkactgtgcaataccccttcgtcatctgtggggaacagatgacacgtgacgtcatccgtgtagacgtcacgttttcccgtgcctgcgggagcccccaatcgagcaatttttgctcttttgagtgtctggaacgcttgaaaccccagacaaatcaggcccagtcgtcggaaaatttctttttgaaattttttggcgcctgcgaaaaaaattttttaaccgccacaaacccccgggaggcgcggwtagggatatcgatgtcatcgactcgtcggtgatctttgattttctctctgcgtctcctattttggaacagtctcgaccaaaaaaccgggcctggcaacccaccgaatccggatgtcggagggatttggcaagaaatgttggaaataacgaaatttcgttattttcagcacaattgtcaaaccggcaagaaaactggatggacaagacacacaatttaccggaaattgtgcttgttacgtcgaatttcccaattttgaaaaaattcctcgttccactggtcgggacgcgaggtcagacgatctgcacgtctgaaacccaaaatcttcggattttatgcagtag

SEQ ID NO: 1171 - DNA, 14 bp, Caenorhabditis remanei
  source 1..14: mol_type = unassigned DNA
cgcgaaccagtcat

SEQ ID NO: 1172 - DNA, 19 bp, unidentified
  source 1..19: mol_type = unassigned DNA; note = Description of Unknown: Trichomonas vaginalis sequence
gggtgagtagtctagtggt

SEQ ID NO: 1173 - DNA, 389 bp, Caenorhabditis brenneri
  source 1..389: mol_type = unassigned DNA
gactcgccttggggaaggtwtttcaggggksaattgccgmaggcaaggcagcccccsmmtagcttacaaagtaagtacmcattttcatttcttgtgaattctttaaacatatttttcttgttttttgatttcttttttctctaccttcccccaattcttcccctcatcttgtgtatacatccccctcctccaaccaatcaatacattgacctctctcttctgtcaaaaaatcaatactagtatattgtcccttgtatagtattatttgacgtcgtctttgtattaggagtaggtaacaawctgtgtatggcttcaaaaagcatgcacaaacwcctgtcaaaaagtawttcccatcmtgtgaatagctcaacgacwkgaagmccaatgat

SEQ ID NO: 1174 - DNA, 839 bp, Caenorhabditis remanei
  source 1..839: mol_type = unassigned DNA
ccaactctcatcgtattaacctacggtattcactcctagtgagtgtaataaaggttaattacgttttctcttgcmagagaaaaagaaaattcgaatcctttttgtgtaactcacaaactgacagagacctatcgaatttcctttgtttcgtatataggaatagtcactctggaccacgaagtggacagttgtcggcggacttccagagtggagagaaaaggtgtgaagagaggaggtctagaaacacttcggctgtctaggaccagttcctgagtggaaagaggaaggtctagaaacacttcggctgtctaggaccagttcgtgagatctctcgtggagagttgaaaacagtcagctgaggctactgtatttcttgatagccccgcccccaatccccctcccccccccctcgacagatttttctgtttgacctcctggaatttgcgaggagtgcgcgagaattttcgaattcttcgcgcgttttctcgaaattttccagaagattcgagcggagaatcttcgagaaagtgagctgaatttcgcgcgaattttccgcgattttcaaattatcgatttttgtcggaaaatttattttctggcaaaatttgattgagttcacgcgggagagaaggaattgttggaaaagggtattgatttttgtggcggaggaaactcccactgaatcaataactctcaaaggagaactcatcgaacaacctcgggtgacctgaatcttgggcgaaattttcgcattgacacaagataamacaaattactgtkgaaaataaatcagaacaaactgtcaaaaagagagacaaaaagtattgattaacaacatc

SEQ ID NO: 1175 - DNA, 320 bp, Caenorhabditis remanei
  source 1..320: mol_type = unassigned DNA
cccttttctatcgtattaactacgataaccgctcatttgagtgtaaaaaaggttcccccctcctcgcctgccttacccacgcatctctgcctctgggaaggcggagggtcaacttgcgggtctgtggatttcctttcctatccaccgcccatattctctgtcgaaagcctacctagatcagccgggagtttttcctatcccattcaggcgatcgctcaaggctgttttatcgacactccttcttgacaagtatttatttcttgacaaattctatttttccttttatcgattttctcttatttatcgattcttgtgaaaat

SEQ ID NO: 1176 - DNA, 992 bp, Schmidtea mediterranea
  source 1..992: mol_type = unassigned DNA
ttaaatcatttttaaatgtgtttgaatatcttaaattatcaaatcatattaatatcaatgctaaaaaaaaatcgtgckcatcaggcgcacgaaaataatggacacaactcgtcgacctgctgtcgactcacagagaacctcaatttggaagaatgggaagcctataatgctacaattccgccaacccctatttgaatgacagatagtcaaatatcaaaaaatatacaaactgctgtcaagcgtgactcacttccttccaatcgaaaaataggaakatgtaagaaacatgaaagtcaagctgaaaaaccaataatatgtcctaaaataaaacaatttgaaaatatgcaaaaaatacctataaaatcacagccgaataaattcccatccgttctaagcagaaaccgctacgaactactgcaagaatcggatcaagtatattaatttccccccmgggggaaattaatatacttgttakaaaattaattttttaataaaaataaataaatcgaataaatataaaataaaaataaatcaaattaaacttttattaacaataaaatcgcagtaagtaaatttccactgttattaaatttaaaacaaaattcctttaaaaatgcctctctttttcagtaataacaccttttcttgcttttattactatttcttgtgtactgtacaaatcgagcacagttattgcaaataggacatagaaattcctttttaagtaaatttaaatccatgagaaataaaataaaatccttttgattcaaagtttctatgttgctttctaatagaatggtgtaagcattaatgggtcttgatttttataaattaaatatatttaatctattaaattaatatgtttttattaattattaatttttatagtggggggaaattaatatacttgatcccaagaatcaactgatgatgaagaatatgttatttcaaaatacatacaagaagctggaaaaaacaaatcaatcgctaca

SEQ ID NO: 1177 - DNA, 1123 bp, Girardia tigrina
  source 1..1123: mol_type = unassigned DNA
gtaggtaactatgactgcaaaataataattctacacctattgttgataactcatctcgtgcgcaaacggagcatgttatttctaatcatttcgtcacacaggattcttctaattctgatagtaatattatagatagagataggaaccttgttgatttagatgcgtcaataacttctcctactattatacagccagaggatagtaagatatctgaggatgaggacttcatcttagtcaataggaaaaagagcaaaaataagaaaaaatctaagaaaacaactgaaaataaaaatgaaattcctattcaaaagagtaaagataagaaaaagaagtctaaaattaataccgaaaaactaactgaaaatattactacttctgaaataccacttgaaattgctccttccatacctttaccttcagcaagtacctcgggttctcaacaaccggccaatcctccagaagacgctactctaagtgatacggatctcttccttacacaggatgatcccgatagtcttattctttctggaagtactcaaccaacctttgttgacctcaacccttcacagcaatcggaacttccttcaaatactgacagccaaagatttgaggcgggtgaaacacccaaaatcataacttcttacagggatgaccttttctactctacagtccttcactacaactcagatacaggttacggtataagtgttgacaatggggagcagaggtttcgaattcttgctaggaatcttgtcaggaaaaccaaggataagttcccctctttatatgctggacaagtaattagacacacagtcttcttcaatcacttcaaccaggcatactacgccaataatataactgatagtaaaggtaatctaattgagttttctgatgataagccttttcaaagtataccgactgacccaaaaactgaactagagcaaattaggagagagagacaacatctagttgatagagctcttagacataatcagttacgggaaacttatattttaaataaacttaataataataatggggggggtggcgaacatttgaaaaggaaaaagatcaaagtcaatacggatgatgtctccagcaatgatggagacagaaaacatag

SEQ ID NO: 1178 - DNA, 43 bp, Chrysemys picta
  source 1..43: mol_type = unassigned DNA
gtttaattccttctgatggacatctgcaacacccgtcctgaag

SEQ ID NO: 1179 - DNA, 107 bp, Acanthamoeba castellanii
  source 1..107: mol_type = unassigned DNA
cccgtcaagggtgctccacgagatccctgtcgctagccgaccggttttaccaccccaccccgcccggacaaccacggaccctgctccgcagcaggaccccacgcacg

SEQ ID NO: 1180 - DNA, 188 bp, Acromyrmex echinatior
  source 1..188: mol_type = unassigned DNA
ggtgcacaacggatgcatcatacgtgtaccggagcatacgggctgtcacggcggctgcatgcgcgatctagctcggagattttatttatttatttattaatttatttatttattcatcgagtgtgagtgttcgcgttttgccgagaagcgattttcgttaagtgatacgcgccgcgttcataggttag

SEQ ID NO: 1181 - DNA, 1264 bp, Alligator mississippiensis
  source 1..1264: mol_type = unassigned DNA
tgctggaaagacggagaaccgcttcctttttccctgcgcctggcctggtattgcagtacctccaggattagcgccaactagtccggcagactgtcggaatacagcaatagaaagwgagctgactagcagcttgctttccttcctccggtgcagcatgggttctcgtcagtcmtgacgggctagggaaggcggtgctgccagtacgtccgaaagagtgccggttgcgcaagcgaccgcgccactcaggtgagtagccaagggtcttacagttcaccggacccgawaacgcgaaaaccccaactcgggctagtagccgaagacctgggtcccccccmggtcagagtaggcgaacgccwgkgctcagaggacggaacgcggaaaacacccccaggtcccaaggacgccctgatccactgacaagaacgctcgaggcacgccaggagacccccagctagggtggaccgccgactgcaggtccggaggaccctcccaggagggtggaccagcgaacccaagttggcgacgaaccctgacgcaccccccacgatgtcaggaccccgacaggcggcggtggaccactgaccatcgaccgacccccagaggcagagagactctcagagcccggaaccccggctgacgagagccgcctcccggcggaggaccccggagcctgaggatgccccccggatgacggcggagcgccccgagcgacagcggacccctccggacccccacggcccctcggtgacgatggcgggccccgaacgacgacgacccccggaccccggcggtcccgaggacgccccccccgagggtctccccacgctggtggaggagccccggacccccccgacaccggacccccccacggacgacccaggcgaaggcgtagacatgacagcactcacgttcctccccttccccctcccggcgaagctgttctgcccgacctgccacccgccaagacagtacaggtcgcacggcgacatgaacaagcacctacggcgcttccaccagctgcgcctagccttctactgcgccctctgcggcaccgagtacgaggccctgaagctcctgaagaaccaccagaagggatgcgagggccacggagccgagaggagacccggcacgctggtgaggtccgctgccccggcccgccggacccaggccgcggtgcgaaggcccgccagactggccaccccgccgacaaccccaccggaccagacctccagggaccacccgacggagagacctgccccagtga

SEQ ID NO: 1182 - DNA, 200 bp, Chelonia mydas
  source 1..200: mol_type = unassigned DNA
ctcttcttatgaatacttgcaacacctgcactgaagatggattctccggctgctatttttgaaaaactgatgctgctttgaaggtgtattctgctgctgctaccttggaaggaaattctctctctgctcctgagacatccccagctgcaccgtgtaccaccaccaccactgctgctgctccacagaaggtttctcggaca

SEQ ID NO: 1183 - DNA, 460 bp, Chrysemys picta
  source 1..460: mol_type = unassigned DNA
ttttttctgatgcttgactgcaaacacccatccagaagatggaatctcctgcagccatttttgaaaaaattgatgctgctttaaagatatactccattctcctwktttgkaagaaaactctttttcagcttcagctattctgtcatcggctgctgctgttcctgcttcccagaaagctcagcmaaaacctatcctgaagaccwcccttggtgcctcacggaagacccggascacctgcaagaaccaaaacattaggagctggctgaagaaaccccccgtggatacctcwgcagggagacctggstccagmaggacakctcttcgggacctcmcatcsaggagcaagaatatctcaacagctcttcaggagggggacccccggagaaccctgcccgcttcccagaaccaggatgctgatcgccgccccaccgggaaggatgccaccgcaggagccccccca

SEQ ID NO: 1184 - DNA, 380 bp, Drosophila yakuba
  source 1..380: mol_type = unassigned DNA
aaagtgtagttcttttctgttttagtgtagtgggaagtctgtttctttttattatgttttttacgaaaaagtcctggtctttgaaattcattgtctaaattttaaataaaattataaaatttaaaaagaaaattaattaaagaagcgatgaaatatctctgaaattcaatcaatcaattaatcatggcgtctcagcgagtgcacgtatttgcctaccccttcgtgggaccattccggtgctccgtatgcatggatgcgtccgggatgcatcccactaggtcgctgggcgaatacggcacatacgctgcggcatatcagcacataacccggcgccacccacaagtggttattacataccgttgccgggtctgtggcgctga

SEQ ID NO: 1185 - DNA, 557 bp, Gavialis gangeticus
  source 1..557: mol_type = unassigned DNA
  misc_difference 325: note = a, c, t, g, unknown or other
  misc_difference 444: note = a, c, t, g, unknown or other
cgctggaaagacggagaaccgcttctttttcctgcgcccggcctggtattgcacttcctccaggaccagcgccaacctagtccggcagactgccggaataatagcctcagaaagagagctggctagcagccctcttttctttcctccggtgcagcgtgggttcttgtcagtcctgatgggctagggaaggcggtgccgccagtacgtccgaaagagcgccggttgcgcgagcgaccgcgccgctcaggcgagtagcccaagggtcttacggttcgccggacccgataacgcgaaagccccgactcgggccagtagccgaagaccntgggcctccctccccaggtcggagtaggcgaacgcccgtgctcggaggacggaacgtggacaaaacacccccaggtcccaatgacgccctgatccactgacaagaacgctcgaggcacnccaggagacccccagctagggcagaccgccgaccacgggtcgcggaggaccctcccaggagggtggaccagcgaacccgagtcggcgacgaaccccgacgcaccccccccgcg

SEQ ID NO: 1186 - DNA, 10 bp, Lytechinus variegatus
  source 1..10: mol_type = unassigned DNA
atctactatc

SEQ ID NO: 1187 - DNA, 102 bp, Nasonia vitripennis
  source 1..102: mol_type = unassigned DNA
ccattccttcgtacgggttttcgtgccggcatagccgggtgggagactcgcgcgggggaggtcatatctcaccaccatcctcgagctttttgctgcacctga

SEQ ID NO: 1188 - DNA, 1097 bp, Phytophthora capsici
  source 1..1097: mol_type = unassigned DNA
  misc_difference 169: note = a, c, t, g, unknown or other
  misc_difference 956: note = a, c, t, g, unknown or other
gcccgccggtggagtagccatgttggccaccaccgcccaagtctccgccgcagctgcgactgctgctgctcatcgagtcgcagtagtcgcagctgcacaagcaccacctcctgccggacgcgccgccgtggagcaccacgcgcgcgctgagccgtaccaagaccaaggnttccaggctcgcgcgcgcgtggmgctcccagccagcgacgcgttcagcagcagggtcggctgcggcagctcgacgctgcacggggacggcagcgacggcaggcaccaagaccacgacgaccaagccgtcgctgccgtccccatggacgtcgaccaaggtgctcggtggccgacagcggatcamcacccgctgtcgccgccaccggagctccgagtcggcggcaagcgccgccgcctgaacgacggcgacgacgaagacatccgcgagctggccgagcttctgctgcccgacgaggaggaggccgacgaccacaaaccagcgcccaggttacccgcgaccagcgctcatccggcctccgtcctcgctgtgtacgcgcacaacgcgcagcgcttcaactgcacgttgtgcgtgtacacggctgccagcttcgctgctcttacgcgacacagggactctcggcaccggcgcgtgaccttcctggacaggttctcggcgggttgcgcgtgcggcaaaccttttgcctcgaggctggccgcagcaagacacgcacaaacgtgcgccagcctcagcaccacactggtcgcggtttcgacgacaggaggagcatcaagccacactgtcgtcggagccaacaccaccgtcgccacggcggtcaccgccgaaccccccctgctccaccatcaagcctcggaactcactgtgcccccccccacgtgtgagttcccccgacgtcgatgtgcagctgcacagtccgccacaggaagatcagcacgaggacgccacccancacccggagagcacgcaacaccaacctcctgaggcaacccgctggggttcgccgctcgcgcccacgctcgttgcctccaggattgctcagcgactcggcgagctggaacctccacgctggggcccaccattaccccgcgcg

SEQ ID NO: 1189 - DNA, 378 bp, Phytophthora infestans
  source 1..378: mol_type = unassigned DNA
agctcggcctcgcggctgccttcccaggcgccgccgacttcgcgctctggcgcggcccacacgccgccgccgagcctccaagcgcgcccgttggctttcgcagacgcagggctcgcggcgacggccctcgccagcccccaagaccccccctacgatgtggcaccacccggcagggcggccggcaggctgcccgactcggtatcgccgggtgctacactctcagccgccacagctcgggccttggcggtccgccattggcccttggagctcgacagcgacagcagcgacgacgaggacgctcaagacccccacgccgccgccccagaacccccagaagacgtcgcgagtgtgcttgccccacccggcagggcaggcagc

SEQ ID NO: 1190 - DNA, 142 bp, Patiria miniata
  source 1..142: mol_type = unassigned DNA
ctgatgtggataccttggaattactcaaccgtgtcggagtcttttgtcttttgcgcccaacacctcatggataccatgcttgtcgctggagcgacgttacaagcgtgagggcgccctccatgccggacagctggtctgtgcc

SEQ ID NO: 1191 - DNA, 291 bp, Phytophthora sojae
  source 1..291: mol_type = unassigned DNA
agacgagcaacgcgctggggcccaagacctggcacgaacgacactgcccaggctgtgaacgacgagcacgctgctaacccggcagcgcaccggcctctgggctccgctgcaccggttaccggtgcaacacggtggggtccacgtcacggcgcgatcggggcagcggctgtagctcgcctgctcacaggcctacccacggcaccagcaccagctacgcgccggcctgcttcggctcggcgctgcccagacccgcccgctccccccgcggccacgacgacagcccccgatgcg

SEQ ID NO: 1192 - DNA, 698 bp, Pythium ultimum
  source 1..698: mol_type = unassigned DNA
gcggtgtacgcgcacaacgccgcgctcttcgagtgcacgttgtgcgcgcacaccgcgcgggatctcgccgcgctccagcagcatcggcgctccgcgcaccgcagcgtccgctttgtggatcacttccacagcggatgcgcgtgcggcgtgagcttccactcgcgtgcggcggcaaccaagcacgcgcgcgaatgtccagagagcgcgttctcggtcgccgccgccgcgcgcactgcagcggccaacaccgcaggtatgtctctcggcgccgacgaacgcgaccacctcgcgtccgtcggcgccttgcatgatgttgcatcccccgcttttggcaacattttgccggttgcgtttgcgaccgcggcagacgcatcaagcgccaccgtgatcgcagacgcagccatgcagcacagtgctgtgccctctgctgccgcccaatcccctcggcgtgcgcacgtcccccccgtgccgcgcgccaccacgacaccatccgcgctgcggattggtggcaaacgccgccgcctgaacgacgacggcgacaacgaaaacagcgacggccgcgacgccgacatcgagatgcgcgccgacgacaccgacgcaccagcgccgaccaaccccgcgaccagtgcggctgcaacgcccgcgcgcacagcaccagcaccaacggatgccgcgaccgcgcgccgccgccacacgcg

SEQ ID NO: 1193 - DNA, 485 bp, Strigamia maritima
  source 1..485: mol_type = unassigned DNA
ggagtgttcttttcggagacgccgcctactttagaggagagaatccccacgggcatcctcatttgatctgatccatcgagtatctgcgaatagtcggcgcactccttttgccatgatcccgggggtctcatggtaaaaaggtttgtggcacggcttagttgacgcccctcttccacgtcactcggcctgcatcgatcgactgctctctcctcttcctccctccctcctcttcacgctctcttcacgtgaccccttcccatcccgcccctcggcttttggcaaagatctgtgtgtcctccaaagcacccatctaccatttgctcgagttgcgattggtcgaagctgccacgccactcgtctactctgcctctctgaccccttcccccctctctccctctgccgccctcgcctctcgggtcccttcccatctccctcctcccatccacgtgctccctcctctcgtcacgtgatcgttgcggctcgac

SEQ ID NO: 1194 - DNA, 1328 bp, Strongylocentrotus purpuratus
  source 1..1328: mol_type = unassigned DNA
aaggctcaaaccaggctgccaaccaagctgccagcttaggcaccaaccaagctgccagtccaggctccaaccaggctgcccaccaatctgccagcttaggctccaaccaagctgcccacctagctgccagcttaggcaccaaccaagctgccagccgaggatccaaccaggctgcccacctagctgccagcttaggctccaaccaagccgccagcccaggctccaaccaggttgccacccgaaagtctgccagtttaggcaccaaccaagctgccagccgaggctccaaccaggctgccactcgaggctccaaccaggctttcacccgaagcattacccaggctgcccgtttaggcacaaaccaggctgccagccgaggctccaaccaagcaaccagcccaggttccaatcaagctgccagccgaggctccaagtaagctgccagccgaggctccaaccaggctgccactcgaggctccaaccaggctttcacccgaagcattacccaggctgcccgtttaggcacaaaccaagctgccagccgaggctccaaccaagcaaccagcccaggttccaatcaagctgccagccgaggctccaaccaagctgccagccgaggctccaaccaggctgcccaccaagctgccaacttaggctccaaccaagctgccagcccaggctccaaccaggttgccacccgaatctctgccagtttaggcaccaaccaagctgccagcctaggctccaaccaggctgccactcgaggctccaaccaggctttcacccgaagcatcacccaggctgcccttttaggcacaaatcaagctgccagccgaggctccaaccaagcaaccagcccaggttccaatgaagctaccagccgaggctccaaccaagctgtcagccgaggctccaaccaggctgcccaccaagctgccagcttaggtaccaaccaagctgccagcccaggctccaaccaggttgccacccgaaactctgccagtttaggcaccaaccaagctgccagccgaggctccaaccaggctgccactcgaggctccaaccaggctttcaccccaagcatcaaccaggctgcccgtttaggcacaaaccaagctgccagccgaggctccaaccaggcctccaaccaagctaccagccgaagctctgccagattaggcaccaaccaagctgccaccgttagaggcccagagcccaccaatcccataacgtgtgagatatgtgaagcttccttccacacctccgccggtctccgtcgccacacggccaggcttcatcgcaccactgctgaacacactgacgacagc

SEQ ID NO: 1195 - DNA, 232 bp, Trichinella spiralis
  source 1..232: mol_type = unassigned DNA
tttctggtatgaatcccaagcggattcgttacgaaatttgcataagtttttgaaaaaataggcatttggtcgagtgctcgcaccaccatttgtcgcgggtcgtcctgatattgcactacattcaggaacggcctattcccttcggggaattgtgttttaggaattggaatcggtttggttacgatcggtcgagtggttcgtgagatcgagtgacagccgggtggcagcgaca

SEQ ID NO: 1196 - DNA, 927 bp, Chelonia mydas
  source 1..927: mol_type = unassigned DNA
ggcagaaactgcacsttctagaagactcactgcctatcctgaggaagactaccgctttggagatggattctactgccgctgcttcaaaagaaaatcttcatgctgcttcggaggctccaggacagastgagaagatgatcgctccctcgccgattccacagaaaccttcaactgccgctcggaccgctgctgctccacggagcgcccatcggggaacagcctctaagagaccctcagcgcttccaggacatcgcagatgagcagcatcgattggaaaagcagcgcctccctgaagaaaacccgtggagatgctgctgcagggawatcttgcacctcgaggacggcctcccaggacatcgcagccaggacaaacatcatctcgcctgctcttcaggasaaggatgccmsaagaacttmtcccacctcctcmactgcccaggatcctsatgctggtcgtcgtcctgctgtgctggaagmkaccccaactggcgagacctcagaaaccacccagmwggacckcaacatctcactagatgcctgcccagccgaacctctccatgcwactctcccagagcaacsagaaccatccagmgaatccgctgatatgactgaagccmatccaacagagggagaaggaaaggagaatgactgcatctatctccagtatcccctccctacggacacgctcctctkccccttccgctatccgagggttccagtacattggcagtctcagcamacacctcaagagaatccatascaagcggatcaccttccggtgtgccctctscgacctgcctttcgagacgcagatgaaatgtaagtctcatcaagtcacctgcaaaggacatctcgaactggaagagtccaactttaccagtctatgttgccgccaccccatctctgctccgaaagcagaaacaccac

SEQ ID NO: 1197 - DNA, 840 bp, Phytophthora capsici
  source 1..840: mol_type = unassigned DNA
  misc_difference 125: note = a, c, t, g, unknown or other
  misc_difference 574: note = a, c, t, g, unknown or other
  misc_difference 588: note = a, c, t, g, unknown or other
  misc_difference 611: note = a, c, t, g, unknown or other
accgcccaagtctccaccgcagctgcgactgctgctgctcatcgagccgcagtagtcgcagctgtacaagcaccacctcctaccggacgcgccgtcgtggagcaccacgcgcgcgctgagccgcntcaagaccaagaattccaggctcgcgcgcgcgtggcgcttcaagatggcgacgcgaccagcaggagtggccgctctactgacggcggagacgaggccaagaccgaggacagcgacgcggacgcagccaagcgccaagccgctcaagcagcaccgagaccccatacccmggacaccgcgccgtacgacggccacagggactcggtgctggctgtgtacgcacacaacgcacctgcattcacctgcgcgttgtgtgtgtacacagcacgcaacttcgccgagctgaccaagcatcgccatgcagcgcatcgtcacacccgcttcgtggatcacttccacagcgggtgcacgtgtggcatcggcttccagtcgcgcgcggcagctacgcgacacgctcaagcctgtgcagacagcacacacgccaccgtagctgcctcgcgcgacccggcmnccastgcssccsgngccggmagcgasgaggaggaccncgcaccccccggtcctctsstcgcggcagcatctgcagctgcagcagccgcatcaagcgccactccagctgcagatactgccaccacgcagagcgccgtgcccatcgctactcctgggccccagtacgccccccacgtgctggagccacctccagagctccgagtttccggcaaacgccgmcgcctcaacacgccgatcgacctgcagccgctggacgtggacgcgctg

SEQ ID NO: 1198 - DNA, 377 bp, Phytophthora infestans
  source 1..377: mol_type = unassigned DNA
gctcggcctcgcggctgccttcccaggcgccgccgacttcgcgctctggcgcggcccacacgccgccgccgagcctccaagcgcgcccgttggcttccgcagacgcagggctcgcggcgacggccctcgccagcccccaagaccccccctacgatgtggcaccacccggcagggcggccggcaggctgcccgactcggtatcgccgggtgctacactctcagccgccacagctcgggccttggcggtccgccattggcccttggagctcgacagcgacagcagcgacgacgaggacgctcaagacccccacgccgccgccccaggaccccccgcagacgtcgcgagtgtgcttgccccacccggcaaggcaggcagc

SEQ ID NO: 1199 - DNA, 166 bp, Phytophthora ramorum
  source 1..166: mol_type = unassigned DNA
tcaagccccgccgccaagcccagctgcggctgttgccgcccctccagcagcagcagtcgcagctgaacctacagcccctcctgctgatcgcgccgccgtggagccccgcgcgcgcgccgagccgccccaagaacaagcacccccagctagcgcgcgcgtggagccc

SEQ ID NO: 1200 - DNA, 867 bp, Pythium ultimum
  source 1..867: mol_type = unassigned DNA
tgactggtgtttgatcacgatcaatgaggtgattaacatgagccggagcaggccccttacacgctggtgctgtaatggttcaggaatgctcttatgagtaactccacagtataatttttgttagcgggggtgagcgcgtgcgccgcccccacctttctcttttcgtttgtatttggttcctctggagcgacttccgtggcttttgtcgcgcgctatcgcgcccggcatgaggatcgtcgctcctgacgccatgtgcgccagtatatcggagccccgtgctccgcttgggtgtgtgttccgccacgacgccacgcgatttgcgtgcacggcatgcgctggcgacttccgctcagtgcgcgaactcgcggtgcatcgtcgacgtgcgcaccggtctctggccttccaggactggtatgagtcgtcgtgcgcgtgcagagcgctcttcaccgcccgtctcgacgcgttcgttcattcgagccgttgcgaccacaatgcgaaccaatcagcgaacgccgtcccctcgtccgccgcctcgacaacgagagcggacgcggatgcgacggccccccctcccgctatctctcttccgcggacgggcttcccccgcccctgtcctagttgcgccgctctccttctggatgcggcaacttggacgacccacgtgcacgcgtgcgctgccgccagtgcgacggcgttgatccagcgtcatctacacgccgttcctcccgtatcgacagcaaccgatctcaacggcgatgatagccaacctccagacccgcgtgccaacatccaacagcttccagccatccattcgacaacgacaacgacaacgacaacgacgacgacccgctgctcgacgacgtgctc

SEQ ID NO: 1201 - DNA, 56 bp, Phytophthora infestans
  source 1..56: mol_type = unassigned DNA
gtacggccgaatccctggcctctcagcctgtacgcggggctatacttggtctaagt

SEQ ID NO: 1202 - DNA, 568 bp, Phytophthora ramorum
  source 1..568: mol_type = unassigned DNA
tgcgcggcagaccaagacgcgcagccaacaacagaccgtgcagcgtgcgggtggaaagcgccgccgcctgaacgctggtgacgatgaagaccagcgagagctggccgagctcctgctcgtggacgaggacaaggctggcgccgaacaccccgcgctcaggctgcccacggccagcgctcatccggcctccgtcctctccgtgtacgcgcacgctgcaactcgcttcgactgcacgctgtgcacgtacacggctgccagcctcgcttcgctcaagcgccaccgctcgtctcggcaccgacgcacggccttcctcgacaagttcttggcgggctgcgcgtgcggcacgcccttcgcatcgaggttggccgcagccagacacgcgcaagcgtgcgccaacctctgcaccacctcggcgacgacttcgacggcagcaaaggcatcaagccccactgctgccggaggcagacccaccgtccgtgcagtggtcaccgccgcgcccgacctgccccgccagtatccctcggagctcgttgcgtcccccccgcagccgagctccaccaacgttgca

SEQ ID NO: 1203 - DNA, 378 bp, Phytophthora infestans
  source 1..378: mol_type = unassigned DNA
agctcggcctcgcggctgccttcccaggcgccgccgacttcgcgctctggcgcggcccacacgccgccgccgagcctccaagcgcgcccgttggctttcgcagacgcagggctcgcggcgacggccctcgccagcccccaagaccccccctacgatgtggcaccacccggcagggcggccggcaggctgcccgactcggtatcgccgggtgctacactctcagccgctacagctcgggccttggcggtccgctattggcccttggagctcgacggcgacagcagcgacgacgaggacgctcaagacccccacgccgccgccccagaacccccagaagacgtcgcgagtgtgcttgccccacccggcagggcaggcagc

SEQ ID NO: 1204 - DNA, 190 bp, Phytophthora ramorum
  source 1..190: mol_type = unassigned DNA
ccaggaatcacccccgccgcccccaagcgctccgccgccgagcccagctgcggctgctgccgccccactggtgacggcagtcgcagctgcccctgccacctctcctgttggccgcgccgccgtggagccccgcgcgcgcgccgagccgccccaagaacaagcacccccagctagcgcgcgcgtggagccc

SEQ ID NO: 1205 - DNA, 130 bp, Phytophthora infestans
  source 1..130: mol_type = unassigned DNA
ctcaagcctagcagcggctaccgcagctactccagctccggtagctgctactgctacaactgctcgcgctgctgctcgcgtcgccgtggagcaccacgcgcacgctgaaccgaaccaagaacatctaccg

SEQ ID NO: 1206 - DNA, 190 bp, Phytophthora ramorum
  source 1..190: mol_type = unassigned DNA
ccaggcatcacccccgccgcccccaagcgctccgccgccgagcgcagctgcggctgctgccgccccactggtgacggcagtcgcagctgcccctgccacctctcctgttggccgcgccgccgtggagccccgcgcgcgcgccgagccgccccaagaacaagcacccccagctagcgcgcgcgcggagccc

SEQ ID NO: 1207 - DNA, 1193 bp, Ciona intestinalis
  source 1..1193: mol_type = unassigned DNA
atcaacccactactacaccctctacaaagaacccactacagcaagatcttggcgaccaactacacctgcagcctcccgtcgactcttcaccacctgcgcacctccctccgactccaagcggcagacagtggcaccaccagcactccaagggtccacagccagaagagtgcaccccccactgctaggaagagctaggccattgcccgctgtgggccttgtgctggctgtctgccgctgattggcacgttagggagtgtgcgctgagcacgatagggaggctgctgaagccgaagaacccgcgccggggactttaggactttaactaaaatctgtaacactaaaattggaatactggattactattggattactactggacaataacctgatctacaacaaccaattggattacagaaccaaattacaatctcaactacaaacaaaaagtgagtccccggccgggtttctatattacccaattactgtttttacaattttaaaattttatagtattttactaatttttccgccccgctagcacttaaattggcaccccccccccccstccaaaaaaaaatagataaccctccaccacctaaaccccggtcaccccctcagaactaattggaacccggatcttttccctctatcaaatttccggttcagtttggcttaattacctaaaacccgtctttattttatccctttattgccccttaaaccaaattattcaaattgaaatccggccaaattgccttgctgaaccaccatttttgtttttcttataaaagtaaatttttcaacaacccaaaatcataaaattaaaactgttatctgattagtctaaattctgttattgacaaaaacctccataccaaccttaatcttatcattatcttcacccagactgctcaatctagttcttttttcaatcaataaggaggtgttttctttggtctgttgttttatagtttaccgttataatagtctgttgtcctatagttttccgtggtgtatttctggtctactatagttggtgcctctaaaacattattataccgaagagtgctagcgatttctattattaactcacccaccagtactgctgtgcatccacgcagcaccacgcctgccatcacgtacagtgcgcttgctgccttgtgttttgttttgcagacaccactggacgatag

SEQ ID NO: 1208 - DNA, 360 bp, Schistosoma mansoni
  source 1..360: mol_type = unassigned DNA
  misc_difference 137: note = a, c, t, g, unknown or other
atctcacgttttaatttatttttgaactactgcagtctgagtgcttctaacgacccgaaggctcagaaactacccacttcttgaactgctactttttgctgtttatccacaacaacagttgtgattctattctccanatattccttgtgcttttgtcaacattattctataccaactgtaccacctacttcttcatctcacgttttaattctggtcttattttctcatcattagtcacggagagggcctatgaacggtccgtgacgcgaaattctatccgcgatttcgacctctcctgctagtggtccccgaagtacggttcctctggcctgtcagttgtgttaaaactatataataacg

SEQ ID NO: 1209 - DNA, 332 bp, Bombus terrestris
  source 1..332: mol_type = unassigned DNA
tcaatagttactcgggggcaggcgggatattggtcttgccttgcccaagtcacactcctacctcctcgtggtaccgccggtaacacgcgcacgtccacatcagcgaggggcgtactcccccggatgtggcggcgcgtggctaaacggagtgtggcgacgaaggagcgaaagactaacaactataacggtcttccgtaacggctacttggagccgtgaataatggagcctatattaaaccctggaactcgttccttcgttctgttgacgactggaacggcaaaggacatgatttggataacaattggaaacttaatatcgaattcacaattaa

SEQ ID NO: 1210 - DNA, 422 bp, Crocodylus porosus
  source 1..422: mol_type = unassigned DNA
aggcgtctcctttaagggcaacggtctggttacgcggtcgcagcagkcttgckccaggtacctccwcgtggttcccgccgggtgccgmagmcccaggsctgtcggtagctcgatcctggcacagtamggccaggggagtkcttccttgctgcwggtgccccacaagcgtktggcagsmcmcctgcttcwtcgcaamaatmasagkgtsmtcagtagtcggccccgccgctagccaaaactgttcgccacscagttacagatggtgcctgtgctgacckgkkgccccgtgggctcggwggtgcaggggwggccggcccatggctgggccagacstgggccktggagcccgctcccamcccagagttccccctcaamgccgccaggkcagmamcakccggggagkgmcacggccccggccgtga

SEQ ID NO: 1211 - DNA, 149 bp, Drosophila willistoni
  source 1..149: mol_type = unassigned DNA
gaagctgggtcggatgagcgcagaaggggtgttctttggaacactgtaattcataagtcgtaagtctgatcaagtcgactcgaaacctcctcgtggtgtttcctgggtgctgttgagttcctagtctctaggttcttttcagtagctaa

SEQ ID NO: 1212 - DNA, 290 bp, Gavialis gangeticus
  source 1..290: mol_type = unassigned DNA
aggcatctccttkaagggtaatggtctggttacatggtcatagcaggtttgtgtcaggtacctcccagtggttcccgccgggtgscamagccccagggctgtcggtagctcgatcctggtacagtacggccaagggagttcttccttgctgtcgggtgcctcgcaagcacktggcagccccaatcgcttcattgcgaaaaacacaaacgtcctaaggggatgatcagctagtcagttctgccgctagccaaaactgtttgccacccagttacagatagcgtctgtgctga

SEQ ID NO: 1213 - DNA, 247 bp, Ixodes scapularis
  source 1..247: mol_type = unassigned DNA
gttccaaaggaaggcactcctttggttcgtgatgagatgttcatggtgcttgcctagctggagaaatccgactcacacctgcacgtggtccctgccgcctgccagtatgccgaggaaacgggtgcaacttaatccgtggatactggtagcaacgtgagcaacggtacggtccttcgcggaccaccctgggcgttcgggttgccagcccgttcgcccgaaatatcttggccctgaaactaaaagaaaa

SEQ ID NO: 1214 - DNA, 473 bp, Mnemiopsis leidyi
  source 1..473: mol_type = unassigned DNA
tgggggccccttggacttgctccctggggcaggacaccagtgaaaggagatcctcaagacaggacagagagacaggcacaccaacccttcgaacctgaggagacacccagatctggttaccccattcctgtaaccatggttgctctccgtgcgctgttaaggaaacccagcctagtaccctcggggaaaggttgcgtagtacttagcagtgtgcggatcaaacctctaccggtctctctagcgatgaaagtttctccgactggaacttgagggactggctagcccagctagcctgtagagcaatgcgtatacgatgccttggcgacaatggcgaccgctgcttagcagacggaggttagtgaaagggcgacttgctgttcatagtcacgtgagtcgtctagaaactgcaccgatgctgccctctgttccaggagaaggacagtggaggactaaatcgtagcgcgagcggtgtt

SEQ ID NO: 1215 - DNA, 1124 bp, Petromyzon marinus
  source 1..1124: mol_type = unassigned DNA
ctattaatgggatgaagaagggggacacgagtttgtgtgtgcatccagtttccatggtgcatgcaggagtggtggtttaaatggcgagactctacagggcttccatggctacacgggatgcaaggcatcagacattttggcacaggcaatccttttggtctctaccgcaatcatgtcttagacctcagtagcgaccactacaaccacagtggtgactgctgttgagtgaaggacgactgagcgctggataacaactttcttgcgtggcccaacatcgaagcaaccacttcggagctggcacaaggcaagagggcagcccaaggtgtgaatcatctcaacttcactgcaggaagaaatgctgtgcaaggatgagtgtgaacgacaccaacgggattgttgctgaccaggaggtgccaaccaaatttgaatggattgactttgggcctggtttctcctgcgtgtattgcacggaaaaacaagtggctacacgtgtggccgtcgtgtcctggggtttcgcaacacaactccacaagatcgacaactatgaggatgacaatgtacttaaagaacaaagagactgacgccaaaggggatttaaaccgccaaatcgtacattgggtctcactacaatttttttacgtgtatttattttcctaagtgtctgtacttgccattcttcgctgctttttctgcattaattgcatatcgtatgcaaataagcgaattaaccaccaccgtgcaactatatgcagatgttacagctgagccctctatcataccggtgtactaatctggtatggtgttggcatgctatgcttgcgtaacgacctttgctgattggttcagtcggctgatggtgggttcaggcgaaacatttgtatattggtttaatcaaaccgaaacactaaaattttgaacacagttttccattacaccagttgtattgctagaagtgcaaatcgaaggagtcaattttgaccgacgattagctgccgatgtgcggtgaaaaagctgatcacaatagcatacacttgggccgacaaccccgtgtgctataaacgtaagtcgcgaattataaagaaaacaaaccggacggactactcggtgacgaactaacatcgctc

SEQ ID NO: 1216 - DNA, 1090 bp, Schmidtea mediterranea
  source 1..1090: mol_type = unassigned DNA
cagtgctattcgaatgtcaatgtgaagaaattcaactaagctctggttaacggcgggagtaactatgactctcttaaggaattaagaatttacctgccktaktaaaartgaaatcmgttgttcatwgcaagtggtattgtacaccttcccgcggtgctagtcgtttaaaactaagttacaaaccacgaggggcgtcctgacggactgsaaaagcattgagrgtcmtgaagagaggctcttattgtacgaatctcttcaacgatcgaagtctggaccgatatgagaactaatacattagttgacaggtgaaaaatactgttgattacttagttctcagtcatgtggtatattgccagtcaattactacatwaatattagtgtggctctcaaaggaacacgattgrtcggcagtccaatgcgcgactggcgggcttgttgtttgcatttgttaccggctacttgaaaaggttatatatagcagacgcttaaagcgcgactgtaatttacatytcattgcccagtatttgtcttttgtcagatttagcaaaatttcatattttgttaattaccttaactggttaaacgatcccataattgcttgcaattattataaagtaattcaggtaaaaattacatatctggctgatcctgccagtagtcattttacttccgccgcgctataaaacagtttaaaaactgaataggaatcaaaaagaacatggcaagcgactatatgtaactgggcattcaacattccctattacatatggtggtgcctggggtctgttttatataatgggtacccgggaagtggatctgtatcaccagtcatggtgccatatctttkgataaagatacagtttaaaactgcgatgatactaatagagatcctcttagaccttcgtaaagaagtggggattgatgacattagcattggaagaattaaatctccaaggaaatggagtaacttcaatgaagtcccacaaccccgttgaagggctgggttcgagtatcgagagaaaactctaaattctcttcggttmtgtccaacggaggggacattactgtaaaatatcctctaaaaacaact

SEQ ID NO: 1217 - DNA, 743 bp, Strongylocentrotus purpuratus
  source 1..743: mol_type = unassigned DNA
tctcgcgacgcgttcttctgcctgatgaagtcacgtcaggtaatagacttagaaggttgatgagcgttcctctcctggaccgggggtgaggatgtgttctactgaatcatcgttccggttgtgaggtccgctgcaaataggccttggggtggtctacctccgggtcgctactccttttgagctagtcgatccaggtgagagtcggggaagcccacttaggtgggccagctaagcagatcacccccccagcacgacagtgcgctgtaatatagcctgttgagagtgcacccatttatactgttataaaagtataaatggttcttagctaacctatccaatgatttttattgttatgtataatactgaccactttagtctagtgtcatgtaaggatccgagacaatagcctatgtctctagtctagcaataacacaagagggataatccacctccctactccagccaccacctttacctttcttatcttccatatagatgccaaccagacgggtcgatgggcagtgagaaacaagaatggggataatttggaatttgacattctttcctaaagcagacctgaagggttaagagtcacaagcggagtccggactgtctttataaacagacaatattttcttattttaccacctatatggggatatttcccaactcgtaatatagggcccactgtcaagtggctggtataagttaccctgtgggtaacaaataaattcaaacaaaga

SEQ ID NO: 1218 - DNA, 1496 bp, Salmo salar
  source 1..1496: mol_type = unassigned DNA
aatctttaaccccggactcttggggttcttacgactctgtatgaggaacagtcgaagagagggcgctaccaatccaagtatatgtcccaagagggctgggacagggtggaagagtgcacctcgcgatctggggcagggaaggaatggagagaagtcgaagaaggcttgtagagaaggggctctcctagatcctaacctgtatgacgcccgtaaaacggtgaccccagtagcgaataaaggaggcaggtgacaatagagggcagggccgacttcccaggtttacattgttgtacttgtcaacataaagaggtgtctcaatagtttgaatcaacaagggagaggaataccgacctgctcccttggggcgggggtactggtcttagcccggttccccgcaagtttcctttgcctgggatgtgcctgactggctccatcccctttccccattaggcacggctagatgacgcaccgatgggcgggtgtgtaggtcgctaccgaaggggactgggggtgtccggtgaaccaggacttcccaaaatggtctcacatttttaagcggcttgagtatcgcccagtatcctcgcgcggcactgggaacccagtcaaccgctctgtgccccggcgcaggcgggggtttaatgtctccccggcttcaccggcgcttcggcgacgacgcagaggagcacccggaggcccccatgaacttaaaccaacctatcttgaaatatggcctctcgttcgggtgaagggcaggtgggaagagagggctgcctcacgataaacacctagtcaatagccagtcgggaaaaatgtggaatgttaggacagggaggtaagggaggcggctttttcgtaaggctccttcaacccctacctgtagtccacctattgcaggtgttgacaacatgcaagatgacctgcctcgttacgggtcgcgtatcattgctacaggtcgtgtgccgcttctaagaggatagtaaggagaggttatagggaggtcctgttagggcttcctcaacccctctctatgcgattccttacaggagtggatcgagaagtcccggacgtaatacaccctggaggtaagggagtggccttctagtagggctgcttcaacccctctgatgggagtgtaccgggaacctcgacttgtaagcacaggttagtatgggagcagaagggggagccgtaatgggcttctctttcacctgcttacataatacctgtggtgcatgtatctaggtcttggcgggagagtactgagagacaaggttgagaccccaagattgggtctccctagcctctatagctgcgactcttagcggggatatggagtaacatgtaccaagggagtgaataataaaggaattgacggggtacaagtgactgttggcccgaatcctagccacttgatgaccagggatatattacagactgagagcgaatctagagacgtgagaataaagtgagaattggttgagcgaatacagaggaag

SEQ ID NO: 1219 - DNA, 173 bp, Tribolium castaneum
  source 1..173: mol_type = unassigned DNA
agtcatagagccagaacctcctcgtggtcccgctgggcacagggattaatttttctgtggcaaatttgactggcttcagagagcgtttttcgaagtggwctgtgtgactgcgttccccccttagttgctatwtccgctkmgattaacatctcacctcgacgtwtaagatcatt

SEQ ID NO: 1220 - DNA, 305 bp, Tinamus guttatus
  source 1..305: mol_type = unassigned DNA
ctggggaccgtggttacaacccgggcttagctgcagagacagtacctccccgtggttcccgccggaccccgtaacatcgggtgactgaatctgtctctgccccgggagtagttcctccttgccctattgaccagcggtcgccggctgctcaatagtattctaggcgtgaaatatagcgatagtcctagtggttgtcttactgggccatagccccttgcttcaggggtcattcgcgaagtctctcaggagaactgggggtggtgttcttctgggtatagctaaaccccctagactgtgtccgatcc

SEQ ID NO: 1221 - DNA, 131 bp, Trichinella spiralis
  source 1..131: mol_type = unassigned DNA
ctcctgactaacctgatttcgtccgtgcggcggcgttttcttttcgctctccgctcgtcgaaatttgctgtagttgattcgcttttctttgcgttttcttctactttcgcagttttttctgcattgccacg

SEQ ID NO: 1222 - DNA, 481 bp, Tetranychus urticae
  source 1..481: mol_type = unassigned DNA
ctctcttattttaacatattcgatgtactcgtacattgaatatgcttttattttttttcaaagttttttgggtgcatacccctggaaaattctgagatgtataaatctcccatcagctttggctgaaacgttggctaagttttgtaggttgtttgccccctactacttagtcgcaaatggtatttgctaacagttgttaaattgttacatttacaagtcctatccagtgcctcctcgtggcgctacccggtaacacttagagtaatctgagtggctaaactggaagggcggaaaatgcaaacaggcggttggtagatgcttcggcattttgccaaaaatccacggctttttagcccaacaacatcagggtgatggacccgccagcttgtggtcaggatcccatccatgaataaagcatggctctgcttctggtgcatcctcaacgggatcggcttcggctggatgtaagtcttgcggaggc

SEQ ID NO: 1223 - DNA, 157 bp, Drosophila willistoni
  source 1..157: mol_type = unassigned DNA
gaagctgggaagctgggtcggatgagcgcagaaggggtgttcttcggagcactgtaattcataagtcgtaagtctgatcaagtcgactcggaacctcttcgtggtgtttcctgggtgctgttgagttcctagtctctaggttctctccagtagctaa

SEQ ID NO: 1224 - DNA, 153 bp, Petromyzon marinus
  source 1..153: mol_type = unassigned DNA
cggtgcgttcccttgggtaaggaacacgagtcttagtggccttgacctccacgtggtcccgctggtaacatcatctcttgatgatggctaacaaggctaatgcacccattccatctcctatctcgcatggaggccgctatgcgtgattactag

SEQ ID NO: 1225 - DNA, 364 bp, Schmidtea mediterranea
  source 1..364: mol_type = unassigned DNA
agtcatagggtgaactgcaattctgacacgatgaccgagctgtgtcagtttgcagctagtcgctaaagactcgatcagtccgccaagtgaggtggccgggtatctgcagcactagagccactggtatcaagagcagagatacgcgagtggaagttgagtacgactaccttcacggggtcctcctgataaccacagtggactgtgggaactaaatgtgtgctcagcgttccctactttctcgtagggtaaagggtatgataacccagagaatatcccatgggagatatccatggaaaaagcaccacgttagacaatccgatggtctaactcggctccgaggggctaactatcccaaagggcttaa

SEQ ID NO: 1226 - DNA, 661 bp, Tribolium castaneum
  source 1..661: mol_type = unassigned DNA
tggaagaccccgcccatgaggcttggagagtgtgatcctgatcacacttgaaaagttatgctgagtacgtcgtgagagtcggtaactgtcccaggatggtctgggataggctaaacctcagcaggggaaagttgtaggggcctgccacccctacacttttatagatatggcattcgatacctcaaatagagcctcggacttggaggagcatggttcccctcctcctcgtactagacctggaaccaacggtcttgacaaccccattggacctacgggagcggaccatgctcatggacatggattccgaagacgaagcgggggaacacggaccccccgccgataatgctcacttaacgtcaggcgaacccatcgaaatcatcttgatgttaccctttcaaagcaggtcatgcggcatatgtctcaatgccggaaagggtggctcccgggcgtaacggacatctatcgctgatggaasctagctcgctcttgaagaacggcggacggggacttggaatcgtggtgtggttctgatgtaagtcctgaaattatggcgtgatggcccgcccgcccgaccggagggacttagaacccccttccgcgagggtcctgtctgtaggtccwccatctccgtaaaacgagttggaggaaaccgcagacgggg

SEQ ID NO: 1227 - DNA, 26 bp, Megachile rotundata
  source 1..26: mol_type = unassigned DNA
tctagttagcaagcggccccctctaa

SEQ ID NO: 1228 - DNA, 1095 bp, Apis mellifera
  source 1..1095: mol_type = unassigned DNA
tggtaatcaaatgcctcgctattttagtagcggtagcgctccgcccgcgcaggaaccattgacgccgccgtagtgtgggtgattttatatccaaccaatcacgtcaactacgatcatttgtaatcaccgacggtacttggtaggggtaccacatgggcattcttgctcattccacaacgccgcctccatcatggcaacaatttaaaatatatataaattcttaaggtttgaccgtattcatatatatatatatatatttaatattacaaccataaatcttatatcgagccttctatttggtctcaaaagcaatacgttgtcagatcttgtagaacatcaggagtgagcggtgcgctgtggtatccgtgctttgtgccgcggcgacaaaccaatacgctgctgcctgtcgcaaagcaatacgctgctgattctcggatgcgggtgtcgacggtcacgcaaagcgatacgctggtggggtttcaaaacaatacggcgctggtgctaaaaagcattatgccgctaacggctggattgtcgatcgccgctgcgggggctagtggcgcacccagagaggtgcgacgcgcaagcattggttctgtgcgaagcggagttcttgagagtaatggttgctgggggcacaaagcgcaacatatagcctcttatgcctcaagtcgtagttcgtacctccacgtggtcccgctggaatgcctatcgactcctccccggaggatcatagagttcgaaaccggctacggcgaggcaagggcggtgaggtgcacaccgatggggagcagcgaccccacctacccttagctaagagagcaggcgatccgccaactgtcagcacgaaataaactaatcatatgtatacgagggagaatttacaacgggtaccttgtgcccgaaccgcctgtaggtatcacctacaggtgttaaaatgaatctgatagctggcggatcgtcgaccctctttgatggctctgcgccaacgactggaaagaataggaacggaagtctaatggaaggaaagtgtcgggagcactataaattcccaaagaagaaaagaaaagaaaaaaaataaaaaacccaaattaa

SEQ ID NO: 1229 - DNA, 655 bp, Nasonia vitripennis
  source 1..655: mol_type = unassigned DNA
gactagactatgggttcagtcagtcccaaatagccgatcctggcgcgtccggcagtaatgccacgtatgagtcggttacccatctctaaacgcgtagaggtggggagctaaaggccaggcggtttacccgacgtcgaatttctccaggtctgtgtcagtcgacggaataaaggtactacaacatctactatctatcgggatcggaagacgccttacagcgttttccgatttttgctctttgagcatttttcttcaaattgcgataaccgacccgatcacgcggggctttgacaaagcaatgcgtggtcggtaagatggttgcaatcttttccacctcgtttcttttacggaacgaaagcaatgcgtgtggggaacgttaaaaactcccttcatgcatcccaggatttatcctgcttactgcaaagcaatgcgtgtggagcgactttaccacgagtcgctccaccgcaaagcaatgcgtatcgcgcaaaagcaatgcgtgtgggggacttgtcaaagatcccccgccgcaaagcaatgcgtgtcggcaccacgtagagcaaagcgtgtaggcagactttgtcaaaagtagttctgccgcaaagcaatgcgtgtggagatcttcgccggtgaaagcaatacgtgtgggcgaacttag

SEQ ID NO: 1230 - DNA, 286 bp, Ciona intestinalis
  source 1..286: mol_type = unassigned DNA
cgacggtgaaccaccttgtcgcggtgtaagagctttagtgtctcgaacaagaaatagcttgtgtgctgtccttctgggcggtgcacatacttcttaacctcccgaggccatgccggcgggggctttagcccccggcaggttttaccatgccggacgggttcgagaggtagaggccaaactaagagttcaccagcagacttcgcacgcggctggccactggccgaagtttaaacaacagggccgcatcttcccaaactcaatatatggtgttaagtgaaccgtgccg

SEQ ID NO: 1231 - DNA, 189 bp, Nasonia giraulti
  source 1..189: mol_type = unassigned DNA
cgggttcccccgacttcggcttgccgtggtctggggctcactgctttttgtggagtcatggttacatggtgaccctggttcctcgcacccccgctggaaactatctggggaggccatgattgggtaacgataaaggtcctggtcgtgtcctcctgagataggctgaatgggtcactaagtggcacctaa

SEQ ID NO: 1232 - DNA, 165 bp, Lepidurus arcticus
  source 1..165: mol_type = unassigned DNA
ggggtagcaattgatcgattcccgcttcctcgtggcgctaccctgggtaatactatgaggaattgatcacaccgtagcgaacgtcatcagtcacagctgcacgaatccagatagaaatataacagacgagtaattcttttaaaagctcgtcagtaatcttcccag

SEQ ID NO: 1233 - DNA, 183 bp, Lepidurus couesii
  source 1..183: mol_type = unassigned DNA
tttggggtagcaattgatcgattcccgcctcctcgtggcgctaccccgggatagcctcaaagaaatttgacggtaaagcaaagaggaattgatcacccaaggcagtacatcggccttcctgcaggagctctgataaagatattagtgagttattctgttgaagctcgctatttcattcccctg

SEQ ID NO: 1234 - DNA, 192 bp, Lepidurus couesii
  source 1..192: mol_type = unassigned DNA
ttttggggtagcaattgatcgattcccgcctcctcgtggcgctaccctgggataacctcaaagaaatttgacggtaaagctaagaggaattgatcacaccgtgacgaatatcatcagtcacagctgcacgaatccagatagatatataacaggcgagtaattcttttcgaagctcgtcagtaatcttcccag

SEQ ID NO: 1235 - DNA, 184 bp, Nematostella vectensis
  source 1..184: mol_type = unassigned DNA
ggttggggccttctcgtggcggagtcgtgagtaaggggtataggggtaagggacaccacggaccgagaacggttaccgctcaaggcgagtggtggaaggcataaaatcgtaacgccgccctccgacctgctcctgaaactaatgccaaccaactgactgtggggctaacctccccagagtcagg

SEQ ID NO: 1236 - DNA, 340 bp, Schistosoma mansoni
  source 1..340: mol_type = unassigned DNA
atgttttaatttatttttgaactactactgtctgagtgcttcttacaacctgaaggctcagaaactacccactttttgctgtttatccacaacaacagttgtgaatctattctccaaatattccttgtgcttttgtcaacattattctataccaactgtaccacctacttcttcatctcacgttttaattctggtctaattttctcatcattagtcacggagagggcctatgaacggtccgtgacgcgaaattcaatccacgaattcgtcctcttctgctagtggtccccgaaatacggttcctctggcctgtcagttgtgttaaaactatataataacg

SEQ ID NO: 1237 - DNA, 176 bp, Triops cancriformis
  source 1..176: mol_type = unassigned DNA
tttttggtctggcatttgatcgtttccgcctcctcgtggcgccagactgggtaagctgatttatcagtgagctaagagaaacgatcaccgcaggagtccatctacctgcgctgcacgtgatttcattgtgcacttggcgagttatcccttgtggagctcgctcgttagcttttgag

SEQ ID NO: 1238 - DNA, 124 bp, Drosophila ananassae
  source 1..124: mol_type = unassigned DNA
agaatatggatttgattgtgcagagggggtgctataccgtaactcgtaagccatgcaatcagatcaagtcgactcaaaacctcctcgtggtattctctgggtgccagtatttactggtagctga

SEQ ID NO: 1239 - DNA, 285 bp, Drosophila melanogaster
  source 1..285: mol_type = unassigned DNA
ttggggatcatggggtatttgagagcagagggggagtattcttctgtaattcgtaagtcatatcatatgatgtgcggaaggggaattttactctgtaactcacaagtctctcctttactcaagtcgactcaaaacctcctcgtggtggtcccggtaatgctaaactcgtttagcagctaatttgagcggaaaaacttttccgatgggctggttccccagaggaaatttattcatattggaactacaagcacaaataacgagcctcggatacctttacacaatctg

SEQ ID NO: 1240 - DNA, 120 bp, Drosophila persimilis
  source 1..120: mol_type = unassigned DNA
aagatatggatctgaataatagcgtagaaggggagtcattccgtaattcgtaaatcgtaaaaatcagatcaagttgattcaagacctcctcgtggtatcttctggatgctattagactga

SEQ ID NO: 1241 - DNA, 128 bp, Drosophila pseudoobscura
  source 1..128: mol_type = unassigned DNA
caattggaaagatatgggtctgaataatagcgtagaaggggagtcattccgtaattcgtaaatcgtaaaaatcagatcaagttgattcaagacctcctcgtggtatcttctggatgctattagactga

SEQ ID NO: 1242 - DNA, 177 bp, Drosophila sechellia
  source 1..177: mol_type = unassigned DNA
gggatcaggggtaattgcgagcagagggggagtatttttctgtaattcgtaagtcatatcatatggtgtgcggaaggggaattttactctgtaactcacaagtctctcctttactcaagtcgactcaaaacctcctcgtggtggtccccggtaatgctaaacttgtttagcagctaa

SEQ ID NO: 1243 - DNA, 160 bp, Drosophila simulans
  source 1..160: mol_type = unassigned DNA
gggatctggggtaattgcgagcagagggggagtatttttctgtaattcgtaagtcatatcatatggtgtgcggaaggggaattttactctgtaactcacaagtctctcctttactcaagtcgactcaaaacctcctcgtggtggtccccggtaatgctaa

SEQ ID NO: 1244 - DNA, 135 bp, Drosophila yakuba
  source 1..135: mol_type = unassigned DNA
gggaacatggggtaaaggtgagtagagggggagtattttttatactctgcaactcataagtcttgcctttactcaagtcgactcaaaacctcctcgtggtgtttcccggtaatgttaaacttgtttagcagctaa

SEQ ID NO: 1245 - DNA, 334 bp, Kalotermes flavicollis
  source 1..334: mol_type = unassigned DNA
gagaggtcactgttgctgatcagctggacacctagctgactgcgtgcatgcgtgcacgccgcgcgccgcctcctcgtggtaccgctggtaacgcagggtcactgagactacctgcggctaaaggcgcgcgcgagggattgtaagtccaccacctccacgtggttccccgcgggcaacggcatagttcatctgccggccaagcgtgccgttccctcgatcctcctctgattagggataggaggggggcggtggctcccgccgacgacctggcaaacaccttggacacgctaagataataggccgtcctccgggccggccgaatcataagcacaca

SEQ ID NO: 1246 - DNA, 1138 bp, Reticulitermes lucifugus
  source 1..1138: mol_type = unassigned DNA
ctcactgctgtcatgccattgttaatgcgttgggtgatggcgggtgatgggagacgagttacagcagagctggcttcacggggggggctgtagttgcccgaaccagtctgcttctgagtgcctccacgtggcctcgctggaaacgtcggagctgcttacggctaacccgtagacaactccggcggccaaactcagaaaacggccttactaccagggtcatccctcgcggcggcgctaagaccttactgtatgtactacggactacagttgagtagcgcgggagagcacttgatgtgagggtagcaacttgttgctacttcgactgtctccctgaagatttccgaaggggtgccgcaagtccatgggggcggtcctgctgtgggagttatcttgcacccgggaagccctcagtggataaatactccaaaatggcttagccacctcacgtggagagaggggaattaggggtttactcctaagggccgatgcctccaatcggatttccccgggcaacggctattatcagccggctaagttcggaccctcatctactgatgggatactctctctccccccgcctgcgtgattagttgggaatgcacgcgggcgggtgattctgacaagcccagcccaaaagttcttaccacgacgtacccgggggtgtcacccgaactaatatattttccgccgatcggttcgctgtggggggatgtcggggcctggtggccgggaaccgtcagccgctctttgagtgtcctgcgtaacccggaggcggtgacgtcgaagggctaggctagcacggtccagacccctgaacgcctggggagacgggcccaccacctgagtaggagtgggtcctttacctcatttgaggtgtctcctcgttcttgtagggggcgaaggacgaggaatgcatccgtccctccaggatgctggtggtttccgtctggtgggctcatgctgaaacgcgcaggtgccgatttgtcgaagaggacatatggggtaacccatagaacctaggcaggagtaatcccttagctgggggggtcagctggtgggtcctgtcaatttatcctcccctccatgccagagccggtccgaggttagagacggactcattttctcctttttatatgtc

SEQ ID NO: 1247 - DNA, 1137 bp, Reticulitermes urbis
  source 1..1137: mol_type = unassigned DNA
cacactgctgtcatgccattgttaattcgttgggtgatggcgggtgatgggagacgagttacagcagagctggcttcacgggggggctgtagtggcccgaaccagtctgcttctgagtgcccccaagtggcctcgctggaaacgtcggagctgcttacggttaacccgtagacaactccggcggccaaactcagaaaacggccttactaccagggccatcccttgcggttgcgctaagaccttactgtatgtactacggactacagttgagtagcgcgggagagcactcgatgtgagggtagcaacttgttgcttcttcgactgtctccctgaagagttccgaagaggtgccgcaagtccatgggggcgacccggctgtgggagttatcctgcacccgggaagccctcagtggataaatactccaaaatggcttagccacctcacgtggagagaggggaattaggggtttactcctaagggccgatgcctccaatcggatttcccagggcaacggctattatcagccggctaagttcggaccctcatctaccgatgggatactctctctccccccgcctgcgtgattaattgggaatgcacgagggcgggtgattctgacaagcccagcccaaaagttcttaccacgacgtacccgggggtgtcacccgaactaatatattttccaccgatcggttcgctgtggggggatgtcggggcctggtggccaggaaccgtcagccgctctttgagtgtcctgcgtaacccggaggcggtgacgtcgaagggctaggctagcacggtccagacccctgaacgcctggggagacgggcccaccacctgtgtaggagtgggtcctttacctcatttgaggtgtctcctcggtctagtagggggcgaaggacgagggatgcatccgtccctccaggatgctggtggtttccgtctggtgggctcatgctgaaacccgcaggtgccgatttgtcgaagaggacatatggggtaacccatagaacctaggcaggagtaatcccttagctgggggggtcagctggtgggtcctgtcaatttatcctcccctccatgccagagccggtccgaggttagagacggactcattttctcctttttatatgtc

SEQ ID NO: 1248 - DNA, 1379 bp, Rhynchosciara americana
  source 1..1379: mol_type = unassigned DNA
cagaacgtggagaaacggaataactacccagatccgttggttaaccggtggcaaagttaatcaaggttgccataggcttaataaccctatggaaatgtttccacacacctccacgtggtgcctgccggaaattgttctagggtgaacaagctaagttgtgagaaacgggctccaccacaatatggagcctgccagggcgcgagactcaggactctccatgtacaaagtggttagttgcaaaaagagtgcgcctagcatgactgataatttttcactgaaataacgttgaactttatctgtgtcatgtgcacaacactatggtgtctgatcaagcaccatcagtggtggacctgctaatgtattagtagaacgtgtccaggcgataatgcacacacggcctccgggcccatcgctttttttgagattccctagaaacttcagtgtgtgcgacaactgtataacccataagggatggacaaaggttatactagggggtaaaaaccctaatcggctaatggcaaatgggatgtagaaatgccaaagattactcgcaccgaataatggtggccgaaaagcgggtaatcgaatgaaatggtaatgctgtagcggaaacatgatcacattctgtgacagtaaaccattagacctagggggaactatgattaacaagataccagcttacatggaagcaatgaaatgtaagtcacagtagtgataagtggtgaagagtcttgtaatcaccgtaactaggccaggttctggggatgccatgaacttagggggagtatggttagcagatctaccagctaacactattactgataatatgtaagccgcagtagcgctaagtggtgtacagatttgcaaccaccgtaactaagttctgtttcgatggactagggggaatcatgattaacaagataccaacttacatggaagttatgaaatgtaagtcacagtagtgataagtggtgaagagtcttgtaatcaccgtaactaggccagatgtagtcaaagcacatgtttagggggaacaaggttaacattggtaaaagaccaatgcaacctccgtaactaaacgtgaaggcacaaaactaaaagtccagtggatgacaggtgaggtcatcactggacccaaatgttttaagctcatcataacaacacggtgaaaaatccagcatttatttgcctgattgagtagcttccacactattccaaagccgaacctatctgggtttttcttgaaaggccgtatagggcatatgtcgagaaataagtccaaggtgaggtagtgtggccctgtacccaggggtaaggtactatacggtcgagtggctcagtaggcctaactagccactgagtcactataatgactagtt

SEQ ID NO: 1249 - DNA, 979 bp, Ciona savignyi
  source 1..979: mol_type = unassigned DNA
ccaaaattacttccagcacctccacagcagacgaacgaagaaagaagacttacgaaataagaataagcagtttaaagacgaagcagacgaacaccactccaccaacgacgctctgcagctacaccaccaccatctcgccgcaacaagaagaattttccgctgctctccactctgctccaacaccacctctcctgctctgtggactgctgccttgctgctggaccaacctctacccgaaggaacccttcgaacccagcagcaaggtacgtgtcaccacctctccacagagccaaggccagagtggatagagcagcggcctctacaaccaagttctccactccgacgacaaaacacctgcctcgtggccagagtcctgccgaagaagaatcttcgaccccaacaccgtctcggcagggctccaagcaacgacatcagccacgagtgcccaccggagtggacgcggcgaacccgaggaccgctgtcgccaagaacaataacatcaccgcctgcagcagctaccaaacaaaggttagtctcctacctcacctacaaactcgtctgaatagacgcccccgcgtgggagctaaccttggtagctagctgcagtgccctgcgacagcggcctcgaagagctgcagagcgtcagcctgcttcgacctcgcttgttctcatttcaacctactccgtcctgtggaatcaaaagagccccactaacaattacattcataaaatctagcaagaacgaagagaagcgaccaacttttaatccataacttttagatctttttatttattactgtttttaagccctaagcatattgcctttttttagatcttataattataaaaatagattcaaagttaacaccaccaggccgctacagagcattttatttaatcaatttgttaccgacctcctgctgcttctttttactttctccagactactacccggatacaacccttggaaacgagagga

SEQ ID NO: 1250 - DNA, 418 bp, Bombyx mori
  source 1..418: mol_type = unassigned DNA
gctagctccctaaaatcctaccttacgtccgaggcgaacatctgtccacgtggggagcggaaacgcgtactatcgaaacttacgcggctaacaaggtaaaggtaacccattaatatggagacaagactaaaaagaaaattgagagggccgcttcccgggggcgatcgccggggcacacctggagctggcgctgggtgttccagcataggatccgtcagcggcggagagttgagcaggcgggctctcgccggggatttacaacccgaaaatgctacagccgccaacagaaatcacgatgtagaaagtaggagcaatagcccatgtgaaccttacagcccgagtaccggttcatacaacccctcggtacaatcatcaccatcatcctcgggtcatagaggctcaccaacgtcgactatgg

SEQ ID NO: 1251 - DNA, 17 bp, Anopheles gambiae
  source 1..17: mol_type = unassigned DNA
gaaggctaaccacaata

SEQ ID NO: 1252 - DNA, 539 bp, Bursaphelenchus xylophilus
  source 1..539: mol_type = unassigned DNA
gggatcctgggttcctactacctcgctccacctcctcgcgatggatcctggggaagtctccggactgagctaagagagcgttaaagtagagggtgacggcgtaagtacctccaagttgcggtggagcggaacatctactcttcggagagaggggaagctctatggcggcgttagaaaggttggactacggcaacgccagggagatggggaaggttcatcaggtgatactagttcgctactgtcattcgatgtatccggaaccatactcgccaagttgtgaactatgtgaaagtctggatccaatccaagaccacggggcgcaattaaaaggtgtgaagcagcttgctggtgatcaccacggtggtacctacaccggcgggggaacatctttaatgccgagatgaccgcgcgaataatagggagccggcaaaagccgagcgtaagtggaaaggatacagaaatttgctcaaaagtataccaacccgccacttataaaagaccgagaaaagggtaccactagagctcattataaaacatct

SEQ ID NO: 1253 - DNA, 919 bp, Heterodera glycines
  source 1..919: mol_type = unassigned DNA
tggcgatactcggaacctccggggagcctggtaggagttggcctacaggtcgcgaaagtccctaggtgctgcacgggttgcgctaatccgagggcgctgggttaccttcccatcggccaaaaacgtctgggccttcttagccgcgggtccagtatttctgttgagcctgacagttcttcccggatatggcgaaagattacagggcggtatttcgtgaaacctaaaaawggtcgggccgaatggcacggacagactcacttcggagtgagctcgggggcatccgtgtgttaccccgctgcaccacgccgaagctgtcatagcgagcccgaaggggaatggccatggagactccagcctcaccctgtaactcgaacctaagtccaggcccctttctggtgttggctcgcactggttaggaacacgacagtctcgtgtaatcccacacgcaccgaaagccctagccctcgtaggcgaaggctgcgttgctggtttcagaactgtgagcwagtggggttcggatggccgagtgtaccaacctgcttgctaacaggtagcatagagtaatatgctagtaagcagggcacgagaaagggccgtaaaggctccggctatgaaggaccttgcgaccacgcgtgtgtctcccacgtgcggattcttgaagccagagtcttgcactgcgcgcaggatggagcctgtgcaactcctccctcgctgatcgcaggagtggaggatcaccactctttttaccttgctagcttggggtaccaccttgagctggggccggccttgctagcttggggtacgaccctttgagctggggctggccttactagcttggcgcgccacccttggagctggggtggcgcaagatcacttgtatacggtctaaccaatacatttgaaaagcgatcaaagcgaa

SEQ ID NO: 1254 - DNA, 488 bp, Parhyale hawaiensis
  source 1..488: mol_type = unassigned DNA
ccgaccgccagcgggataactggcaaaccctgtctcgaccaccggcccgtgaatccatcggggcgtatgagtctgacacaggggggtgtttaaggtgaccctgttgcgaggaaatgcgcagcaaaagccggatgagccttagaacatcgaaggccaacgacaacctgccgaaagactggcgactaatccagtcaacctcctgtaggtcaccggctggtcatgctgaatctcagcttaaccaggcgtacgaacttacagttggagggtcgagcacccctgatggctgaaaaggaccatcaaagtcgaaggtagccaacgagaagaccaacggctgattcaggcggaagagtcaactcgttgaatgcgttcgacagcttggggtagatggaactcctaagccctgaaaggcagtccatcttcgcagacgctaaggtgccccgccgcctgagggttatcaggccccgccgcctgagggttaccaggcaacc

SEQ ID NO: 1255 - DNA, 791 bp, Bursaphelenchus xylophilus
  source 1..791: mol_type = unassigned DNA
gaggatcctgggttcctactaccctgctccatctcctcgcgatggatccttggggaagtctccggactgagctaagagagcgttaaagtagagggtggcggcgtagtgacttccaagttgcgatggggcggaacatctactcttctgagagagggaaagccctatggcggcggtagaaaggttgggctacggcaacacttgccatgatcagattcgatcaaaattagcctctggggctggcaaccctacaacggattgtaaactgaactatgctatgcaaaatgaaaataaaaaatgggggctttacaatctaaggtgttggcagatcacgaaaactgcccgtcgatgagggtgagataacatcctacggaacagcccctgctggaccaaaccaaatcatccacaaattggagggttttcttggtagtttcccttggcacgtcttgtttcataagccagaataaaaacgataccatacagacatgaggctgggtacctgccagccgcgacacggaaaaccggtaggtgcaaccggagacagctaggggaaagaaaatagtaaagtgtcgaaaacaaaacaggtagcccctggctagagggaatgggacattgtccgattaggttgccttgacccaatgaaagccaaccgggtttacattatcggtctaccaagggcaatgaccagagaaactgcgactatgccgtaacccttcgcagattgccgatgagaaccatcgatcgtaagtcgaagccaagcggattgaccagtggagggttatcccgacaacagc

SEQ ID NO: 1256 - DNA, 1171 bp, Heterodera glycines
  source 1..1171: mol_type = unassigned DNA
tgtggcgatactcggaacctccggggagcctggtaggagttggcctacaggtcgcgaaagtccctaggtgctgcacgggttgcgctaatccgagccccttccggtgttggctagcactggaggggggggggtccaaagaatacgtgaagcggaccctgtgttttctctgacctcatacgggtatatcccgatgatatctatacagtgttcattttcatttcttaacctgctttttcctcaagagaaatatgaccacattcgtttgccatttcgaaggtgcgacttttgagggagttctcagggacatcaagctgttcatggacggcttgacggctcgtggcggcacgcagccgcgcgggccagttagggctggtgccaatgaggcagcgaagaagtctctgaaacgccaaaagcagcgggagaagagagagaaagcggggacgggttagagataatagcatgattgacggcgaagcaatactttgacttccaggtacggaggacggcggcaaaaagcaaaaaggggacgaaaccgatggcattgccaaaggggccgaaaccattgagctggacgctgatgggccgtctgccgcgcaaaaggaggggggagcccctccgtctgggaagaaggtgcggcgccattcgtccaacaaaccggaatagatcttgatgatctcagcaattgatcatattgatctctttttccagttgttgcgataaattatcgtgcattatttcttcgatttctccaaagcttaactcctttcctaatacctactcatgtatacgttagtaggcatgttttatgcaggtaaagatagacctggtgcccccgggcgacttgggatgtggatgatggttggcggagagttctgatgacgccgtagttccggaggaacagttcctactagtgccagcctgggctagtggagctggtctggcgagtgctttgctcgtcagataaggggtggttggggtggtacctctggaatgatgtgtcggataagcactctgccttataaagctgtcgttctgcccaggtttctcctaaccaggttgaacttgtaatgagcctttgggtatctggtcggggtctgcgcggagatagctcgtgaggagctgttattacattattggttgaacgcttttgggtcgtactgcacagataaat

SEQ ID NO: 1257 - DNA, 1414 bp, Strongyloides ratti
  source 1..1414: mol_type = unassigned DNA
cgtcagaagagcaggtgtttttcaaagcaaagacttattctacgaaggggaaagatgatcaaacatgcagatttggctgcaatgaaatagaatcaaactaccatgtggtgacatcttgcaaataccattcatacacaagaagacacgatatggttgtgtacaatatattaaaaagactaaaagaaaagtataagttagatggtgatttacaatatggtagatcagtatttaatgggaagaaggaaaaaattaggatcagatctggccataagtttttgactgaacaaccgttagtaaacaataaaccggatattgttataacgatgaaagaagggaaaaaaaagataacgtacatactagagatgtcgataccacatatctagaacttgaagatgcaagaaagaataaagtataaaaaatattgtgtgagctccatggtaaaaataacgaatgataatgttgattcgatagctcgtgattttaatctactaaatttaatggaaagaaaagaaaggtgtaagataaagtttggatcatttgtatttggctgttatggagaatatgtcttgactgaatctgctctaagaacacagaaaatcctgattgaattgggattctccaaaaaagagatggatagcttgatcaaagagtgttcttacagttaaatgaatgagacagcaagaattattatgaaacatctagaaggcgaaaagaatcaagatgaaatcagccattaataacttttatttacccaattatttattgcgttaacttgattatatgatatttattgtatatttattgtttaatttagtttcatagtacaaataaaagaatatactacgattctttacttttaagttctacgagaacgttgttttagaatattttaataatatttctactacaattaagtaattagaagaaatcaacgaaagcagctaaacttactcgcaaaattcgttgatcgaggctggaatggcaccaactaatatactaaccaacaatagaaaaaaaaagaagaacttcagtggacttcaaataaaataaaattattggtagaattgtatgataaaactgagaaaatttgactaaaacaaaaagattagagcaaatatgtcatcattttcctaatcatacaattaaagcgatgatgacgaaattgagagaatttgaaagagaaaaaagggaaaattgtgaaattaaaatgagggaaaatgaggaaaaacctgaggaaaaattaaattttgacaactatgaagaagcaaaattgaaaagaggaattaagtgtaaaaaagaagtaaaaccaattgttattgaaaacaaggattaggaatttttgaaaacggaaaaattatttctcaagtttgtcaacacaatcaattaccaaagaaagaagggtaaatcaaccaga

SEQ ID NO: 1258 - DNA, 722 bp, Bursaphelenchus xylophilus
  source 1..722: mol_type = unassigned DNA
gggtcctcggttcttactaccgtgctccacctcctcgcgatggaccctggggtaggcctccgggctgagctaagcagagcattaaagtaaagagtgacggcgcagttgcttccaagttgcggtggggcggaacatctactcttctgagagaggggaagccctatggcggcgttagaaaggttggactgcggcaacactagccatgatcagattcgatcaaaatagcctctggggctggcgaccctataacggattgtaaactgaactatgctaacctgtcagtaaagacagaacgggggctttgcaatctaaggtgttggcagaccactaaaactgccctttgatgagggtgagataacatcctacggaacagcccctgctgatccaaacaaaatcatccacaaatcggagggttttcttggtagtttcccttggcacgtcttgtttcaaaagccagaatataaaacaataccgaagtacagaatggctggaacctaacagccatggcacagaaaaccggtgggtgcacaccggagacagcaggggaaagattgcaaagtgccgtaaataaagatggtagctctctgacctgagggaatgggacactgtccgattaatgccttatcccgaagacggtcaaggttctatcttatcggtctccaaagggctctggccatagaagctgcgaggaagccgtaaccctacgcagattgccgccgtgc

SEQ ID NO: 1259 - DNA, 1793 bp, Bursaphelenchus xylophilus
  source 1..1793: mol_type = unassigned DNA
tgccagcggtgttgattaggtccaagttctttggccaaagatccgccctcggtttagcagtaccgaacgagtataccttcaagtggtggcactgaattagactgaatactctgaactgtagacttttgtgcaactgtgtatggtgtggaagacttgtttgtaccactatcagctttattggggctcgttactgtttcatacaggtagatgtcccctttagagatttccctgcagtttgcgctccaagtcgctagcctcttgcgtgtagtcaaaggaatacattcgccgtcggtgacagggctatacccggcgactacggacttgtttattacgtagtgcagcctcgtttaagacgaatgtgaaaagaaggtgtgattactaagcgttatgagtcgggttatctggaaactccgccccgccgcaatggcttcaagggtcaaactgctaacattttaaaccaatatttggcagcagcagactatgatgtcagagtgccgggggtctatcgatataagactgaaagcgatagacgtggagtgaaaggattccctttgttaagagaatcggtagaattcactttttacttattcaagaacttaacagcaacaagcactcgcgaggattaccgccccagattcggtcggcggtacttcacctgctttcttccactttcggaatctggcatcctggctttcagtgtggtgatggccggcttgagttttcttgagtcgtgcgagtgcctcatctgggacgtccggaccgattgatggagtctgcagtggacgaggacttgatggaccgtaaccatagtatatccctcatgcgtcttctcgactcgagggggtagcttgcactacccacccttctcttctccgattgggatttagacctagccctctggtgtgtctcgacccgcgatatcagattcctgaatcgactgtgagaaatgtctacgcgcaaagatcgacccattgccacccggctatgtggatcgggctcttgactgcttatctccggctttaatcgcttgaggaaaggggggtgtcgcccgaaagggttacgcgatcatccgattcctaccgtaaaaacgtagttgaagtaggattgaacctgagtaccaagtgaaaagagtggctataatgctccatggtataccctagggataaccgtgtcgagcgcactgctcaataccctgatttgttagtgtaggtatgtctagtggctgcctaggcagattcgcctattcactacgtaaaatctgggtgagtaccataagaacctcctgtagggccaggagtcaaactagtccaggttcggtatgcttcggtatactctctcacgggctagtcacctaagagttaagaaccgcctttttctgcactgtgaatagaaaaagaagggcgggagaatatacgggcgaggtaagcacgtcggaacggggtgtgcccaactcgtaccgtacgcccggacaaggaccatctttcgtaccccgttcacccggcacaagtccgattgtctctcccgagaggcgtcggcggaggttggctaacgccgtctctccaaccatcggtttgggtttaagtaacgccccagtggccggtagccaaactgatggaggcagaaatgccggtccgttgctaaatgcgggaacggaccaaaacgccggtgtggtggatacaggtggaagagtcttttggtctacgcaagaaaagaccaggctcaagtacgaatacgaccgtcttcgtgaacgacgccgtcgagacaaagttcgaaatcctacggtcgataaggcc

SEQ ID NO: 1260 - DNA, 450 bp, Ascaris lumbricoides
  source 1..450: mol_type = unassigned DNA
ggggccggtgggtttactcacttctgacccaccaccaacggaacgagggaaagcagagctggggccctcttccgattggcatggaaccgacctccacgtggtggccctgggcaacggaattcaagagaggatttaatcctctctatcatttgcaagatggatgagatcgaggtatccggcaaacaggttccaagtgagcacctttcccatagctgggaatatgggttaggcgtcctctgacatataagaggaatcagactcgttcgcgcccggtcattaacatcgatcagcgggagggccggactgaagtaaatttcctgttggcccgagtgcaggtggagctcggacccgaaaaacgatccctaagaggaccacaacccgaagggatggacgcagtcgccccggcacgtttggtgttggttatcctggagtgttgtgggacgaatagct

SEQ ID NO: 1261 - DNA, 100 bp, Heliconius melpomene
  source 1..100: mol_type = unassigned DNA
ataaataataataataataataataataagccccctaaaatccaaccatacgtccgagtcgaacatctgattctcgtggggggcggacacgtgaaaataa

SEQ ID NO: 1262 - DNA, 129 bp, Takifugu rubripes
  source 1..129: mol_type = unassigned DNA
ttctatgcgccttatgcgactggataggccagtggtttacgccgctgactttggtgcggaaggttgtcggttcgaatccaggcgagcccttaggcaaggctccttacgcatatatgcctacacctcggt

SEQ ID NO: 1263 - DNA, 325 bp, Taeniopygia guttata
  source 1..325: mol_type = unassigned DNA
ttcaggttatttagatgcttagtttttgtacctttcttgttttgtttaggattttgatagtgttagtatttttatatttttgtacgattgcataatgttcttttttatacagttctgttttaataaaatagacgatagctagagacgttagggcagccacaagccagttaggtagcggatagtaggtaggaacagacttttactatttcataacgcgtcaattaccacctgatttggaccaattcacgggatttgtccaaggtggacgggccacctttacttaacccggaaaaggaacatatataatttatgtgtgttcgataaa

SEQ ID NO: 1264 - DNA, 289 bp, Geospiza fortis
  source 1..289: mol_type = unassigned DNA
ggtagataatctttgtatagtggggggggatctcatgtaccgggtttcttttatttgattttcaataaaacagacggtagctaggttcgcaaggcagccacaagccaaagataggtagggtgctcatagtgagtagggacagtgccttttgattcacaacgcgtcaataccatctgacacggatacccttaccggacttgtcatgatctcccagacttgtccaaggtggacgggccacctttacttaacccggaaaaggaacatatattaattatatgtgttcggaaaa

SEQ ID NO: 1265 - DNA, 350 bp, Zonotrichia albicollis
  source 1..350: mol_type = unassigned DNA
gtagtcacattgcactttctgtaacttgcactgggtgtgggatgtgggcctggggtgtgggttatggggtatatatgtgggatattctggtgggaatgtccattcactgtatgcctatctttttaataaaaagacggtagctaggttcgcgaagcagccacaagccaatagccagttaggtagctcatagtgggtaggtgacaggaacctttgactcagaacgcgtccattaacatctagaacggaccaaacttcggacatgcaccgattaaccggatttgtccaaggtggacgggccacctttacttaacccggaaagggaacatatatagttatatgtgttcgtaata

SEQ ID NO: 1266 - DNA, 1449 bp, Danio rerio
  source 1..1449: mol_type = unassigned DNA
aaatcccagcgggatacagcaagaaggtatcggatctaataaggttgagcgaggagagggtggagatcctttggggggggtcgggctaagttcccctctcgggtcctcccacggtgacgctctacccctccctcctcgctcgtagaacccaacggtgaacacggttggcaggatgaagtgacgtgaggggtaagacatgcgtacgtgagcgcgcatttttgctgttctctggactgggtttcgtccccctcacaaccatcacttacactataggggcacagcggctcctacctccctccctatgacccccccttcccataccgatccatggctgttctagtctggaccgagggtcggacggggcatttgaaggtagctggaatcctccgctgctgcgagcctgaggtcgatggttagaggtgaaatacttgggaggagacacagcctccggagagcccctcccgggtggtcatcatggcaaccgggtgaaaccttacggtttcacttacgaaacagcaccataacagcgccgtaatagcgcaccggtgtgactactgtccagtgctgatattctcatctggagaatacaacacgggtaatggcagagtattcaaaacccaaatgtttacgatcgaccaacggagtcgttcccttgcatctaggccggacccgaaactgccgtaattgcccgtccccaaggtagcctcttagaaaaccgaagcccggtcggggcggtggttgcggcggcgctgcgggggcctgctgctcgggcggcgtcggtgtgccgcggtggttgcggtggtgcggcggggatctcggtccttgcggtgccgctgtgccgccgcggtcgcgtcggtggcgctggggtggtggcccgagtggcgtcggcgtgccactgcccatagtcgcccgcgggggcgaccgatctggaggggcgagggggctcgcgggactttaacgagaaacggaacgcaacttctcgcatcgctcccgggactttcccccctcgttcagccgagggatgccaaaaggcatgaaaggtaagtaccataccggtccgcaaaactctcttctgactcggttctctgttggttttctagagtaacaacgaggtggaggagagggacatggcagggactcccattcgtgccagcgggtggggacagatcgaaggaacggttcgagggcgtaacagacgagagggaatccggtcacacattgatgccatgcctaaataggcgaggtttgtatttctactttgtgggttcagtatagtcggagcatatggtcggttgtcccgttgttttcacggcgggcaagcgactatcatgataaagtagaatgggagacgggctccctgacaaacccggaaaggcgcccccccgtggttcgtagcagctgacggatcacgctcgaagaaaaatgagtgagaggggacgccgcaaccac

SEQ ID NO: 1267 - DNA, 1155 bp, Gasterosteus aculeatus
  source 1..1155: mol_type = unassigned DNA
ggaggggagtaggtctctactctgacccgaagggcccccccgtttcagacctgattctaggctacctgtgcctaattgggggggtcccaaagagatgttgtctgttgtagaagggtttgcgccactgactgcacggaagggtgggcctcgacaggtaggggttacatgactccgtgctgctcagcagacccgcgcctctgagaccgggtagggctacttgaacaagcgacgccctggtgtatgtccgtatcctaacctggtttgggaaagccgataccggcaatgcccgccacaggtgtcgcgcaccccacgggatgacgtatgggccccgggggacctcatggatactccactggacttgcacaatcctggtgtactggatgcagcgacgttggtgacataagcaatcgctaagtcggggtaggggaggtggggacctcggcacggctgtaggaacgggtgtatgggctccggcagccgtcgtcactcccatacaacacaggggctgcatcctggtggccggtgctagttggttctggaagcccgcccgggctggttcgcagaagcagggtgcgcccagggtaggtttggtatatctgggtccggtgcgatacctatcgatgggcagcgagggccgcctcgtgacgcgctgtgtggagctggagccggcctgggtatgaacagttcttgcggatgtggcgtagctagatagtacccgtggttgtgggcgtggtgtcgaccaaatgttgtcctgtgtgcacataggccaagggttacgtgggtggcagtcagaagcacccgcacctggaagtgattgccccgggatcccggctctctgtgaagagctaccttgaggaaaggtgttccgctggaactcaagaccctacagtaggggatatcaactggctttgaggtgctgtgattccggaaccagggcgagggcgagtacttagagcatgtccaaaagcccggggaacgttccgggggcctgcttgggtcgttggacccacatccgtaaaacgatggatctcgcgtcggcgctcgggagaacttcccgcatgaacgctgattgcatgtgagaacgcccccacggcggcggggcaggcgctccccctgggtgtaaggctcgggggggtcacggctccgctctaaaag

SEQ ID NO: 1268 - DNA, 245 bp, Bombyx mori
  source 1..245: mol_type = unassigned DNA
gccttgcacagtagtccagcggtaagggtgtagatcaggcccgtctgtttcttccccggagctcgctcccttggcttcccttatatttaacatcagaaacagacattaaacatctactgatccaatttcgccggcgtacggccacgatcgggagggtgggaatctcggggatcttccgatcctaatccatgatgattacgacctgagtcactaaagacgatggcatgatgatccggcgatgaaaa

SEQ ID NO: 1269 - DNA, 507 bp, Hydra vulgaris
  source 1..507: mol_type = unassigned DNA
taaatgccaaaagttgcttgggctaaatgatacgtacgctagaaaaagcgacttgctgcacggatgacggttcatcagagcccgatatgtgcatgtcaaggcggcagggagaatcactagtgtagctgttctttccattacgacttacgcggttaacgtggcacgatagatttacaccaggaaataatacgtgaagggttccaccatatactggagtttagatctatgagggaaacatttgtaataagtcagtctggtaacctggcgccgctgttgagtcaaattaactatgtcaatactcattaagttatcgactttgatatggcatggggtgattccgcgttatatcaaagtcaaacatgatgattgcaatgagaaactaccacgcttggtcacgtttgtgaggagaacatctcattcaagcctcccggatgtcggcacccgctgacatcttctggcttatgaaaattttcattaatttttgtaagtcatgggcggcttgaaagc

SEQ ID NO: 1270 - DNA, 523 bp, Hydra vulgaris
  source 1..523: mol_type = unassigned DNA
atgcccgaggtagttgggataatgatgcacaagctcgtaaggcgacttgctgcacgtatgccgctaaacgcttagctcgatgagtgcatgtcaagacggtcgggagtatgatcagtggagctgactttccagacaactcacgcggattcgcgtgcggtggatacaacacctggtataacatatgaagggttccatctagtacagggataacgatccatgggagcaaactaattagttggaggtaatccaacgccgctgttgagtcagtttttaaccgccagtcaactcttgtaggttatcggtcttcggcagaccttggaccgcctagcgccggccaacagtttgtcgtcgactaacatgatgatttgcgagagaaacccacgctttgtcacttatgtgaggataaaatctcttgtccatatgatcctttgaagggaacagcgctttgagcttgctcggcgttggcacctttagtctgtaatattttcttgatattatggacgaaaaaggtagtatggttgca

SEQ ID NO: 1271 - DNA, 303 bp, Adineta vaga
  source 1..303: mol_type = unassigned DNA
actagtctccttcttctattagtcagtctaattaatttttcttacattctacatctagttccattattaaattggtatgatcagtgctatctctgctacactcaatgcttaatcgtatgttattgacagtctgacacttgattactcttacgacatatgcactgtttgcttcagagaaaccactgttcatatagtgaagttcctcagttttctgttgatatattcttctttcattctcgcttctccttttctactgtgttctttttatcagttttttgtggaaaaattgagaataaataaagt

SEQ ID NO: 1272 - DNA, 108 bp, Oryzias latipes
  source 1..108: mol_type = unassigned DNA
gggggacagctgggagtctcggcatgattacaaatcttgcgctgcactcggatgtcgtccccgtgacggacacattaatccggaaagcgagtggtgactcgcctcaag

SEQ ID NO: 1273 - DNA, 148 bp, Limulus polyphemus
  source 1..148: mol_type = unassigned DNA
attttgtctctttccccaatgatgtctactagcacgctgccgaagctagatagattgaggaatctgcgtaatctgtaatgattacgcctcatgggcatctatcggtagcgtcgaccctgacgttaaattgggtaataagaaatatcga

SEQ ID NO: 1274 - DNA, 1570 bp, Caenorhabditis elegans
  source 1..1570: mol_type = unassigned DNA
cctccagggcacgccgcacgccaaaagtcctggcataactctgcaaataacatcaaacgtcaatcaactccacaaactctccactctcttcaagtcttctcggtgcttccaacaccacaatggtgaaagctccttcaccttttccctccaaaattcttcccatgtggggaagtcctgttcttgtaagctctccggaggctgcaagagcagaagaaattcttctttctgacaaggtcagaaggaagtcctgttcttgaggcgtccatcccgggcgtcataggagagatcagatgcaccttctagcaggagctagaagggctgccctgtcttgagatccccacgggggtcaatagacgggaggggctgctggctttctctttttaagaggaagcaccaatccggagatccttaggggtcaaaggattaaaaggcagcaggtccaattctcctcactgacttcggtcagagaggagtcccgccttggagacctccccggggaggttgctgaagaggcggaagctccttctagcaagagctagagggagttcccagtcctgaaacccttgcggttgatgatggaatggaagagtacttcggtactgctcgttgctctctctgcgttttactgccgagggccggatttgctcgaatcgcgaaaggtctcaatcgaccattcaagatgacggcttatctaaggtccgaaagcagttgggagagtaacgtgttctcctacctttcaagttgaatggtcgttttactgtttgggatagctgacttgatgctagtacgcttcatctgtggatgacgctccccaagcagtcaagtagacttgaaaggtgccctcgccctagttagctcttagaccttatgggtcgccatggttgtggacgggtatgcttgccggagccgagtcgtgtttcttagaaccaacctcgacgaggcgaaagcttgcacaagttagcacaattgtggtagggccgactagaaaatgagtcccttagggggttacgccttggcgaaagtgaggacaattggcattgacgggtgcttcggcactaggcaaaggcgccaccacactgtccaatctctaaaaagttcacattcatcgaagaactaccggaaccaaccacacatgtgttgaaacctacacggtggaagggaaaggaaagcttcgctggaacgaaaagaacggataggttccccttcttgatggctgtgaggcttaggatggacgggaaggccgtgaggcctcaggcgggtaactcggccagacgctagttgatcttcggatcacgacagccctggctaagaggaaccctggatggagtgtgaaggatgggcgggtagggggttaagcctgttgacagaccaccgactgcagtcacaaaatcagtgattatgcgggtggaccaatctgttggcgggtgtttccctctacctgaccccgcaatatggtatgtacgatcctcggatctaaaattcataatggcccaccacaaccataaacctccctagcagctggtggtcccgataattcgggttcttgccactactgcgacccaggctcgcc

SEQ ID NO: 1275 - DNA, 130 bp, Cryptococcus neoformans
  source 1..130: mol_type = unassigned DNA
tgaggaagaggaggttggattattttttcttttctttaataagttgtttatttaagtagtttctttcattcgggcaacccacacgacaacccaataaattaaacaacgaaaaatgcaacctctataaccc

SEQ ID NO: 1276 - DNA, 60 bp, Chondrus crispus
  source 1..60: mol_type = unassigned DNA
taagtccttgacgcctgccccgtgatacagcatcggtacccctagcatttgaataaaaaa

SEQ ID NO: 1277 - DNA, 69 bp, Chondrus crispus
  source 1..69: mol_type = unassigned DNA
taattcaccttcatatctgctagtgtctctgtaagcgcacccctcatgcattgataaaattacccccca

SEQ ID NO: 1278 - DNA, 348 bp, Acanthamoeba castellanii
  source 1..348: mol_type = unassigned DNA
taagccgcgcgacgaggacggccaggacgaccaggacgacggcgacggcgaccacctagcaccgcacgcgccacgacatattgtcgcgcgctgtacaggcggctaggtcgagcccagccgaccgttctgagcctcagtcggcttgagcccccggcttcccaaggcctaccggggcggctctttttcgccctggtttttgccggcctgttttttctctcccccttttccccccttttccatttgtacttagtttttccttcggccgcggcagcttgttgcccggcatagtgttaatatgtttaaaaaacgtgtaaataaataactgtttaaccctaaccctaaccctaa

SEQ ID NO: 1279 - DNA, 261 bp, Fragilariopsis cylindrus
  source 1..261: mol_type = unassigned DNA
tagcaccaccatctattcatatccacacactgaccacctccaccttcacaactccactctcaattcccctgactactaagaaatatttcatggtggttacattggaggtatcccaacaccaagcacaaaatgaacccactaaccctctcatcctatccacggggaccacctttgagcagaacaccattcatattacaacctttagctagattaagataattatttagtacatattttatactattaaaaaaaaaaaaaaaa

SEQ ID NO: 1280 - DNA, 32 bp, Hydra vulgaris
  source 1..32: mol_type = unassigned DNA
taacttgtatttttaaattgttttattagttt

SEQ ID NO: 1281 - DNA, 27 bp, Lactuca sativa
  source 1..27: mol_type = unassigned DNA
tgaactatattttatatattaaaaaaa

SEQ ID NO: 1282 - DNA, 528 bp, Monosiga brevicollis
  source 1..528: mol_type = unassigned DNA
taggtaggcaccgtctcgggggtccctctgtggggatccctgtgtgcacctgtcgctccctaggtggttcctcgttgtgtcttttgatggcttgacttgtatttttgttttaattttgctttaatttttgctgtatttgtgtggtatttttgctgaatttttgtaaggtcctttgtatgatgtctttgtcttctgtggtcggttgttttcctcaatccgacgttgtgtctcgttggatgtgagcgtgccgtggtgttctttgtgtttgtgctgtgatggcttgtagttgtgatgtgtgactgcctttttgggtgtcttgtgtttgaaatggccgtatctctggttatacttggtcgttttgtacgatttttgtttctatgtgcgtgattcttcgcgcttgtacttcttggcatgatagaagccaatgaatgtgtcttgttctcttgtgttgttttgcgtgccgtcgtgattttgatgtcggggttgcacagctttgctttcagctctgaggttcaaacacctaattta

SEQ ID NO: 1283 - DNA, 38 bp, Hydra vulgaris
  source 1..38: mol_type = unassigned DNA
tgagctcttataaatttatattatagcattttgtttta

SEQ ID NO: 1284 - DNA, 363 bp, Magnaporthe oryzae
  source 1..363: mol_type = unassigned DNA
taataggtaacgtccctatttttgtctttggttttgtttttatctttgtttttgtttttgttttcgtttttgtttttgttttcgtttttgtttttttttttgtttttgtttttgtttttgcctttgtttttgtttttatctttatttttgtttttgtttttactttgttttatttgttttatatttaccttttgattttttctatttttcccacccttattattataaccccaacctactaatattttttcttttttcttttttctttttacggttttattttcccgtttgttttttctattttatttgtacgacaaaacccttagcaaataagcttagaatataataaagcgcgaattaaaa

SEQ ID NO: 1285 - DNA, 85 bp, Branchiostoma floridae
  source 1..85: mol_type = unassigned DNA
tgattaaagacccgaaacacccaatgaccccgggttcatcactgatgatgtgtccctgttcgcactaccagagtgtattctagag

SEQ ID NO: 1286 - DNA, 127 bp, Danio rerio
  source 1..127: mol_type = unassigned DNA
tgatcaaccccggctgggtcacctgggtgagagtgtatgatgttgagagacccgaaacactcaatgatcccaggatacatcactgatgatgtgtcccaaatgcatccatgagatgtttcttgcataa

SEQ ID NO: 1287 - DNA, 270 bp, Branchiostoma floridae
  source 1..270: mol_type = unassigned DNA
tagaaacccacaaggctgagaaatgtagagcatctgtatggacaatattgatgattgaaatgttgtgattttagatcaaatttagaaatatgaaaaccgaactaaactaaatataatgttttttttaaagtaatgataagcaatacccacattgtgcaatactatctatgttatgtcctttgtcccccctgcatgtttggtcaataatgaccatcgtgtcctgggctccgtgtacctttctttactatgaataaagaatgattttactac

SEQ ID NO: 1288 - DNA, 154 bp, Danio rerio
  source 1..154: mol_type = unassigned DNA
tagcatgccacttggacacaggccggggtctgatcagcctcggtcgggtcgcctggaggagggtgtctgttgcaagacccgaaacaccctgtgagcccaggaaacaacactgatgatgtgtccaaggttgtgcatcaggagatgtttctgtaac

SEQ ID NO: 1289 - DNA, 123 bp, Takifugu rubripes
  source 1..123: mol_type = unassigned DNA
tgatcaccccggctgggtcgcctgggcgagggtgtatgatgtcgtgagacccgaaacaccctatgaacccaggatacatcctgacgatgtgtcccagtgcatccaggagatgtakctttaagt

SEQ ID NO: 1290 - DNA, 128 bp, Tetraodon nigroviridis
  source 1..128: mol_type = unassigned DNA
tgatcactcccagtcgggtcgcctgggtgagggggtctgatgttgaaagacccgaaacccccgatgaccccaggtactatcactgacgatgtgtccaagacatgcatcaataggtgtatttagaaatc

SEQ ID NO: 1291 - DNA, 508 bp, Schmidtea mediterranea
  source 1..508: mol_type = unassigned DNA
taaaatggcaaaaagatatttcaagatgaattgtggactcatctaaaaaatgaccaccttgagtccaaatatgcctagctatcatggttgctgatggaaacagtaaggcacctgatagctaacttttcactgtgaatatcttcagatattcacagtgacacgaaaggacaccactagtaaaaaccactagttttttctgacacctcttgctacaaactctgtaaaaatcaaaaggatcgataggccgcgctttcacggtctgtattcgtactgaaaatcaagatcaaggaagcttttccccttttagtcaacaccaggtttctgtcctagttgagcttcccttgggacatctgcgttaccatttgacagatgtaccgccccagtcaaactccccacctgacactgtcctcaaaacagttcaattgcatccgaagatcgcaattttttcactaaaataaattaacaaaagttaattatactgcttcattgagtaagtagaaaaacaatc

SEQ ID NO: 1292 - DNA, 659 bp, Caenorhabditis brenneri
  source 1..659: mol_type = unassigned DNA
taaacccacacgagamctacgacgccataagatcaggcatgtacggatgtgaatgagactgatgaacggaatgagcacgtgcccataagatcgggtatkaaagawcagagacgatccctamcatcgggaaaacacgagttatactgcttcactgamctcgctaagctctcataatgaccgaacttgttcgcaactgcctcctaaccgggcgggtgtgagaagggaggtcgccttgaggcggacgcaatgagggatgtgtgcaggttccccctcttgagatccgaaagtctaaaagtactagaccgaaagatcgaggacggacgggatggccgcgaggcacacggcgggtaacacagccagataacctagtagatcttcggatctcgtcggcctggagatatgtggaaccctgggaaaggagaaagttgtttgttgggctggcaagagtgaagtttgaatgtgaaccaccgtcatgcaaccactaaaccagtggcgatgcgggtggagtcatcacaggaaaatgtttctgttgcttgacttatcagtgtttgatatcgccctcaggcacaagtatgaaggcccccacccacataaactccctagcaactggtagtccagcaagcgctggtwcttgctactattgcgccccaggctcgccc

SEQ ID NO: 1293 - DNA, 680 bp, Caenorhabditis japonica
  source 1..680: mol_type = unassigned DNA
taaaagccaaaagccacggagcatcgggaaagaaaaatggaaaaggactgaaaacgagactgaaaaatcccaaacaaaacaaatccaaaacaaactgaaaaaaaaaaaaaaacaaaacaaaaactggacagacactggaaacagtgtcaggcaaagtcgccgattatactgttccacgccttaaaagtcccgaaatggcgcaaaacaacctgaatctatctgaaagtgctccaaaccacgcacaactcggagaaaatcagggacaagttgcttcacgcaacgggctgggacaggtaccccctcctgaaaccgcgaggttgaggatggacgggaaggccgcgaggcttatggcgggtaactcggttggtgtgctagtagatgatttatatccgacagccccaactaagaggaatcctgggaaaggaaaacttgaaaaagtttttacagggctggtaatagttcagcacaattgtagtctactgtcttgcaaccacaacaaaccagtggttctgcgggtagatcaaactataatttgtgtgttttcttttacttgacccgggcaacacattataccacgtccacaaggacgaattcataatggcccctccctaaataaactccctagcaactggtggtccggcgaagccggttcttgccactattgcgccccaggctcgccc

SEQ ID NO: 1294 - DNA, 893 bp, Caenorhabditis remanei
  source 1..893: mol_type = unassigned DNA
tagccgatcgtaaaagaaaccgagccgtaacaacaagcaaagtaaacaaaagaaaaatcaataaaaaggaaggttgacctcagaccccgaggagggaagagagacaccsagaaaaagagagacgcagagaaaaggagagacacctctcataaggagaggtaggtcaatccaaatgtaaacagaaaaaaccagtggggaggaaagaaagactgatttcacccactaaaatgaatttggaaacagaatttggaagagaaaagagaaagggaaacctaaagaaaatagttctcttgccaaaattctgtagaggaatactttgtcaaaacatgatagaaaccagtaatctggtacgaaagacaagtaagacctgaactgacaagaaggaagtcagaaagaaataccgctcacaaagcctgtgatcgattctcttacctactgaacttgttctcttggcctcgtaaccggctaaagggagaaggaatgttaattggagatagacataaagataggtggagtgaaggtcctgttcttgaaactaggaggaatgtggaaagagcagaaggccgcgaggctttagacgggtaactcagtcagttgctagtggtcttcggatccaacggcttcggacatagtgaggaaccctgggtacggagaagaaatggaaaagagatagggcgggcaaaggctaagttcatacactgtcatgcaaccactaaaccagtgggatctgcgggtgaatcactttcgaaaagaagtgaatggacgtgctgatgtctgactttaaagaagtctgaaattaaaaaaacagatataaaggcccctcactataaactccacagcaacaggtggtccggcgaggccggttcttgccaccattgcaccccaggctcgtc

SEQ ID NO: 1295 - DNA, 409 bp, unidentified
  source 1..409: mol_type = unassigned DNA; note = Description of Unknown: Trichomonas vaginalis sequence
taagaagagataagacgagtgagaagaacagaagcatagtaggattggcagagcttaagcgatgtcactcggtacgaaacgtgtaccaaacaccggattccgtgctaggaatcacaagccaaaataaaagagacaccacgaaaattactcaccctccctcaaacagataataatattaacctcccatccatcagtccgtatggtctgataacagactagcaccacatccatgatacactcattggagtgaaaaccaccaacaacaaatccacctagaccaaatcctgccccacctccacccaagtagctcgcttcgctcgctcacctaaaactttgctcgctcgcttcgctcgctcgtcttaaccctttccgaataaacacttacaattcccggctcgccccatttttt

SEQ ID NO: 1296 - DNA, 1468 bp, Caenorhabditis brenneri
  source 1..1468: mol_type = unassigned DNA
taaaccggctcctctgggaggaggtatgtcagaggacattctccgtgggcggatgggaggagtagggtaacgacccgtcattctggatgcctaaaccaccacaatctgtcaaggcaaagtgccccaaaagcacacgcgtggatcggtttggatgccgactgagccagagggcaaagtcgaaggccggtaggctcccggcgggttgtccgtcatagtcagtggtgcgcctacacccaactgctatgacacacaaggacaacccaaaataaataagccaaggcggcgttagcttcgagctaacaagctccccgagaggatggttgccacagggcaccatcctggggaacgacccgatctttcggatgcccaaccaccgccaatctgtcaggcaacgtgccccaaaagcacacgtgcggagcggttggatgccgactgagccagagggcaaagtcgtaggccggtaggctcccggcgggttctccgtcgtagtcagtggtgtgcctacacctaactgctatgacaagcgtataggaggcccggaaaaacaagccaaggcggcgttagctgagagctaacaagcttctcgtggatgggtgccagagggcaccatcctggtgggtggatggggggagcttgggaacgtcccgatccttcggatgcccagaccaccgcaatctgtcaaggcaccgtgctccaaaagcacacgcgcgggttggtttggatgccgactgagccagagggcaaagtcgtaggccggtaggctcccggcgggctctccgtcatagtcagtggtgtgccttcacccaactgctatgacatgcgtacaggaggcccggaaaaataagccaaggcggcgttagcatagggctaacaagcttctcgtggatgggtgccagagggcaccatcctggtgggtggatggggggagcttgggaacgtcccgatcgttcggatgcccaaccaccgcaatctgccaggcaacgtgcttcggawggtcattggttctagacttgtaatagaccattggccggaagagcacacgcgcggttggttggatgccgaccgagcctagagggtgcaaacctgaagggcgaggtcgaaggccgtgaggctcccggcgggaaactccgtcatagttagtggtgtgcctacacccgacgactatgacacataggaggaatcctgatctgatatgatcatgtatatagggagggcgaaggtaaatagtcagkgtcaaagtccacgtggcagctactccccagcatagtagtgatgcgagtggawccaactttgacactgatgttccctgagcctgacccatctgcacaaatccaacagtgtatgatggcccacacactgaggacgagtatcacttgtgatactcagaggtgtcccccatgatcaaccaatatcacagctagcggacctaccgtgaggtagacccccgccgctgtagcaggctcgcctc

SEQ ID NO: 1297 - DNA, 635 bp, Caenorhabditis remanei
  source 1..635: mol_type = unassigned DNA
tgaataccgtcagataagcccccaacataaaaataaaagtcggcgttagctaaccactaaaccggctcctcattgggggagagtatcattccggtgctctccgtttgggcggtagggaggagttgggtagcgacccggaagtatggatgcccaaccaccgcaatctgatctggcattgtgtttcggatggtctctgtctctagatctgaaatagagctctggcctgaagaacacacgcgcggaccggttggatgccgactcgatctggagggtgcaaacctgaaagggaaagttgaaggccgtgaggctcctggcgggaaactccgtcatagtcagtggtgtgccaacacccgacgactatgacatagttggaggaatcctgatctgataataatcattgttcatataagggagggggatggtaaatacccagggtccgaaaccatcaaagcagctactgaccagcatagtagtgatgaacacatagaccctggggttccctgaactcgacccatctgcacaaacccactttgtacaaatgaaccaaactgatgaagagtttaatgatttcttacatcacagctagcggacctaccgtgaggtagactcccgccgctgtagcaggctcgccattg

SEQ ID NO: 1298 - DNA, 1425 bp, Caenorhabditis remanei
  source 1..1425: mol_type = unassigned DNA
taacatgccttggaaggcaccacgccaaaagtcctggcaactgatttgaataatgtataaaagtaactggaaccaaatgcccgataggtagggcgggagaaaatgacctagaaaacacaaagtcccaagcccccggattcgaaagacctataggaagtcagtgaatagagagaaatatcaaacaaatctcacccattcacaaggacttactggtcgagtagaaaacaagccaaaacatcaagcacgacgcaaaaaggggtaactttgggcaactaattaacggatacctccgtgtatcaggcaaagccgccaccaacagcaaattactgcccgataggtagggcgtgagaaaatgacctacaacctccaagacccgagcccacggaatcgaaagacctataggaagtcagtgaattgatggaaatacaaaaccaaatttcttccattcacaaggacttactggtcgagtagagcacaagccaaaatatcaagtatgacgcaaaaatgggtaaccttgggcatccaatcaacggatacctctgcgtatcaggcaaagtcgccaccaaactgtactactccgaaaaaaccaagaaacatgattttcccactccgttaaagcatctcaaccaagctaaagcggtaaggttatcatgtcaaaaggtgtagctacagcaacctaaagcccgaaaggtagggccgtataaaaagacctacaccctccaagacctaaacccacgaactcgaacgacctacaggaagtccgtgaatggagagaaatatctcaccaaatctcttccattcacaaaggctaactggtcaagtagagcacaagctaagcctccaagcacgaagtgatatgggtaatttaggcaaccaatcaacggatacctccgtgtatcaggcaaagtcgccacaaacactgtactactccgttactcccaaacacatggatctccttctctcaccaaaaagctttataaccaagctaacggtggaaaggacatcatgtcacgaggagtagctacagtaacctctctcttgagactgcaaagtcgaggatggattgggaaggccgcgaggcaaaaggcgggtaactcggccagacgctagtgatcttcggatccgacagccctggccttagaggaaccctgggataaggagcacgacgggaaggatgttccgcaaggatttcccttcccattagtcagggctggcagttggtaatatagcctttctacacaccaccgtcttgcacccactaaaccagtgggatatgcgggtggactcaatgtagaaaggtgttcccactgcctgactcgccaactttatatgtcttgtcaacataatggcccctcactataaactccctagcaactggtggtccggcgaagccggttcttgccactattgcgccccaggctcgcc

SEQ ID NO: 1299 - DNA, 146 bp, Schmidtea mediterranea
  source 1..146: mol_type = unassigned DNA
tgagtgtgctacgaggcagcgctggtaattgcatcggcgttgcagatttgtgtacgatagataaaaaccaatagtaataaatgctgagcctagctcgcatatctaagccgaaaggcagcatatatatgagacaatttaaaaaaaaa

SEQ ID NO: 1300 - DNA, 178 bp, Girardia tigrina
  source 1..178: mol_type = unassigned DNA
tgatccgtgtgtttgtgtcgtatgattgtttccgtgtgtgtctatatttttcttttttatactttcaattacctcgttgtaatgttataacttcatatggaatatatgtaatttagtttagtttagttagtttagtttagtttagtttagtttagttagtttagttagtttagttagt

SEQ ID NO: 1301 - DNA, 338 bp, Chrysemys picta
  source 1..338: mol_type = unassigned DNA
taaccgagaccgccgaccagggaaataacccacttccttccctgacgaaccaagggacgcaccccacccatgtacttattcgctacaccgatactgacttggactccttatacattccatgggtggcgtacccgagcccacttatccactgacactttaaaaactcttgcaccccaatctgggtctatgccggttatgcgatatgtatgtatctcttcatccttgcaaccgatacctgtaatccctcataacccaagcctgaccccagatgtacagtaccttccctcttaactcgtgtatatttaattttaaacattaactttaataaaatttttaaa

SEQ ID NO: 1302 - DNA, 124 bp, Acanthamoeba castellanii
  source 1..124: mol_type = unassigned DNA
taacaaccatgtatggtgaaccacacctctctcgatcttgtattctgtgattggacatcagagttcctgcgaagggatacactctgccaatctcgtgggttgtaataaatccacaccttcaaca

SEQ ID NO: 1303 - DNA, 668 bp, Acromyrmex echinatior
  source 1..668: mol_type = unassigned DNA
taaattattttgtctttgtcttggccccccctttttaaaccaagcaggagagagtggcccaatgcccaactattatatattaactatttactgtgatatttattatttgactgttgggcgggcccctctctgctggttttatttatatatattttttactcgcgtactttttgtactactctatttttctttttattttagctatgctatttttatctctttctttgtctctattttctttctttttttctttccttttcttttctttcttttattcttcttttatttatctttttttcttttctgttgtggggccctgaccgtccgagtgtgaatgccgcgaaaaacaatattatgttttatacgagtgtgcatgtgcgtgatatatttatctattttattttatttatttattataatttattgccgcgcgcgctcctccgggacttttattcgttgacaatactgtgatatttttctgckcaggctgggggggcttgccccccagccccttagttttaattgcctatgcggggggggcttttgtcccccgcaaatgtatatatatatatatttagcgcgcggcttagccgcttttgtttgtattaccccagaggggaattgtccctctggggaaaaaaaatgattggaaaaataaagtgagctaa

SEQ ID NO: 1304 - DNA, 408 bp, Alligator mississippiensis
  source 1..408: mol_type = unassigned DNA
tgaaccccccctctgcaccagatggaccttcacttcgagaggattcttcagcaatggacgaccccgctccacccgaagaggacccccgcgatgagactctatatggactgagacactttttcttcgaaccacttcctccaccattgcggaccattgtaacgggtttgtgtgtatctatcttctttctctctcagcgtcgcgaaccccctccctccccttcccctccccctcccccccacccccgggcttagttggctaacattgtatctcctgtaacctagttgcgttcccctcctcacccccatccctctattgttagtccctcgctcgggcgctctgtatttccctaccggctttgtcatcttttttggattcacaatcctaaacatctactaataaaagtcaatc

SEQ ID NO: 1305 - DNA, 401 bp, Chelonia mydas
  source 1..401: mol_type = unassigned DNA
tgagccggtacgacatcgtgcatcaactatgagaaagggactgagagactttttccattggaccatatgaactggaaccataaactcactgaacattaaatctcaccaaatgagggtaaatccatcctcatcatcgtatccactcattatactccacacctgaacatagccattatatgaacaacatacccccatatctcaatgtctgtactttgacccgttaaccttttacccccaatcggggatattgcagattatgtattccttacgccacccgatcctaaaccgaatttcgcaccccttgataatctgtaccttattccctgataaccagaaacttctatgcttaaactctgtaccgtttttttttatttcaacatcatcttaataaaattattaaa

SEQ ID NO: 1306 - DNA, 402 bp, Chrysemys picta
  source 1..402: mol_type = unassigned DNA
tgagccagagtgacatcgttctcccactacgagaaagggaccaagtgaccttctccgttggatcatatgaactggaaccataaactccctgaacattaaatctcaccaaatgagggtcaatccatcctcatcatcatatccactcattatamtccacacccgaacacagccactctatgaacttcataccctcatatctcaatgtctgtactttgacccatcaaccttttacccccaatcggggatattgcagattatgtattcctcatgccacctgatcttaaaccaaactttgcaccctcgataatctgtatgttattccctgataaccagaaacttctatgctcaaactctgttcactattttttttaacatcatcttaataaaatttttaaatctgtt

SEQ ID NO: 1307 - DNA, 228 bp, Drosophila yakuba
  source 1..228: mol_type = unassigned DNA
taaaaaattaaaatgccttaaaaataaataaatatatcaaaatttaaaaaaaaaaacgaggaacaaataaacacaaattctgaaagatttatataatttaaaawataaatcgaaaataaatgttgaaaacaaaaaaaaaataataataataataaaaacacaataacactcacccggcctgccccagaggcaggtaaacatttactggccatatggctttttttttaa

SEQ ID NO: 1308 - DNA, 408 bp, Gavialis gangeticus
  source 1..408: mol_type = unassigned DNA
tgaaccgccccccctccgcgccagacggaccttcacttcactccgagaggattcttcgaccacggacgaccccgctccacccgaagaggacccccgcgatgagactctatacggactgaggcacttccttcgaaccacttcctccaccattgcggaccattgtaacgggtttgtgtgtatctatctcctttctctctcagcgtcgcgaaccccctcccccaccccccacccccgggcttagttggctaacattgtatctcctgtaacctagtcgcgttcccctcctcacccccatccctctattgttagtccctcgctcgggcgatctgtatttccctatcggctttgtcatcttttttctggattcccgatcctaaacatttactaataaaagtcaatctgttcttt

SEQ ID NO: 1309 - DNA, 297 bp, Lytechinus variegatus
  source 1..297: mol_type = unassigned DNA
tgaatagcatttatattgtgttccaaacaacatactcattattatatctaaacatttttttttctgttcctgacaatctacgtaaagtctgctaaccaactggcatgatgaaataagataaaatccccttacacattaatttcttgtcacatcataatgctttgtcaaagcaatgtcctacataatatctcgatgtcaccccaattaattttacatccttcggtaacctttataccgttggatcaacatatatgatttgtaaaactgttatttctgagttttttctatgctaataaa

SEQ ID NO: 1310 - DNA, 257 bp, Nasonia vitripennis
  source 1..257: mol_type = unassigned DNA
tagtggggccataacacctaggccccacagtgtggcgatgtccatgtgtgtcgtccttacttatttatttatttgtcctgtcgagctgtttaatctattcatatgtatgtgttgtgtgtgtcgtccctcgtagcagttttattccgtccaaccagaggtcgaccaatattaaaataagcatggcttgaagcaggccaagcgccgtgttctaaccccgttttaggggaagttacttaacctaaaaatacaacttttcc

SEQ ID NO: 1311 - DNA, 246 bp, Phytophthora capsici
  source 1..246: mol_type = unassigned DNA
tagacggcacagttctggcccacgtaggccgaaagggccccacccatgtagggaaccgccctcgggaaatccattccggtgttcgactgaagagatgctccttcgccttgacggaggtacatctcgacagtcgaacttcaactcgcaacatatccgatacagttacaaaccacagttagatatcagataggaaccttcctttaggaagctaacgggtacactggatggtaaatacacatacatttc

SEQ ID NO: 1312 - DNA, 948 bp, Phytophthora infestans
  source 1..948: mol_type = unassigned DNA
taagctggtcatcatgaccgacagggcactacccaggtagggaaccgcccttaaaaaacccaggaagacacaaacaccctccacttagtgacatacatattttagcctagatttcagttacggagaggttactaactggtaaatacgaacacatattctgttctaatcagtgtgaaaactggttttcgccttttggcggactttttcactcgcatttttgggcaatcgtctgcggctagcttgctagcggcggacgagcggtctccgggggcgttcacctttcccccgcgaggccaactacaccgatcttctctacacttttctaattcgcctccgtcttcggtcttcggttgtcgggcttttttctttttgaccaatcagagcgcgccatgcgcctcttctggccaatcagagaccgggccctgtcctcggacagcgaggcctccacggccagccaatcgagtctcggcagcgacgcgtctttctatagcgcagctgacgaggccgatctggcggcccccgattggtccgactttcggccaatcagcgacgacgagggggcaggggtttacacttttgcccccgtttcgacttcaacttcaggccaaaatggcgatttggaccctccacgcgccgtgccactgctcggcaccggcggcgattcagcgggtgcaacttcgggcacgtgtgcaacacatgcagcgcccattgcacgccaagcggcatcgcgggacgacgcctcggccgcccaagcgcagccccgcccttccagcacgacctcgcgccgtttggcggatcgccatcaagacgtgcgagagccaggcggggtcgggcaaaatatacttactctaagtatgcccgaatccctgccctctcaggctgaacgcggccccatacttgatctaagtatgggaggatccctggcctctcaggctgtacgcgagaccc

SEQ ID NO: 1313 - DNA, 1277 bp, Patiria miniata
  source 1..1277: mol_type = unassigned DNA
gattagcgaacactaatatcctgccmtagacgtgattgctaatccgcaaaccaaccggatctacagcctgaacactgaactttaatcttcacccatgtcacatctggacactaggtttttgctctgtttgtgttttcctgcctttwcmttggawctttcgcmctggaatttatttgtcgcttggattattttttttctcacaatttggatctattttcgtttgttcacttcgaactctagctgccctttcttcggacactgaactttaatcttcgccatggctgtcagtcgccggttcacttgctgcggtgggatcctgttgtgataatccccgtgcattgcccatggatttatttccgccttagttgttcctaaccttggatttattgctgtgggtgatgcccgggttttgtttacatcgggatcccgctgcggctcggtgttccatgcgactggcagcccctttgtttactctsgactctattcattgttgtatttcttccacactggccagtgatcacactgctgtgtttcccgggaagatatcctctgcggttttcacgctctgggtgtctccccgggcaacgcactggttgcttgctgcgccatcacccttttcgtttatattcattttcagtctgccgttatcttggccagcgctcattcttttgtgatggccgtggactgaccctctgcggttttctgcggtcascactctcggtgaatgctgtgccaccatttttcatttgtttactttttcagctacaattatcctggccagctttcactcttttgtgatggccgtggacggaccctctgctggttttcacgctccgggtttgtctgcggtcagcacccttggtgagtgctggtcgtttgtttgctcattttgcttagttcaccattatctttmttctcttttgtwtggttttcctagcggttgtctgggagttgagctgcagttgtctggtcttggttttacccccatttgttttcttttaacgcggggcgtattgccttgaccggccgtctcagcttttctcctagagcaaccttccgttcatccaacttttagttttctcagttcttggccattccggttggttaatttttatttatacttaattttatgtttacattttctggttggagaccattttagcttgttttaatagcttttcttctttaattaataccctctgccattgagggtttttattactattaattttgtttactctttgtaacttgtttgattgaatattttaataaaccac

SEQ ID NO: 1314 - DNA, 346 bp, Phytophthora sojae
  source 1..346: mol_type = unassigned DNA
tgaagctgcacaagcgcgaggctcgacagctggaccttcagctgtcgagccactgcatccgcgccagccaccgcacctggggctggtactgccggcgccaccgcgaaggacaacggagcggcaacgcctcgcgagcgccgcgtgggtctggggggggcccgcggcgcacatcgcaggctcgggcacggcggtaagctggtcatttgaccaacagggcactacccaggtagggaaccgcccttcaaaaacccaggaagacacaaacaccctccctttagtgacatgcatattttagcctacatttcagttacggagaggttactaactggtaaacacgaacacacat

SEQ ID NO: 1315 - DNA, 159 bp, Pythium ultimum
  source 1..159: mol_type = unassigned DNA
tgatgcgggtcatattgaccgaaagggcaccatccacgtaggacaccgccctcaaaaacccagttcagtttattgacaccctccacttagtgacatgcatattcaaaccgatacatattcgttaggagaggttactaactggtaatatatcaccatttc

SEQ ID NO: 1316 - DNA, 371 bp, Strigamia maritima
  source 1..371: mol_type = unassigned DNA
tgatgggagagtgaggaatcttctccactgtgcaaaaccatacagtcagaagatgctaactactagtttgataccctgtgccccctgcaatgtcccgcgtgtcgtacccaagcccggctggcattgagacacattaggctctcgctcccccgtatactctcataatttcgtgtacgctaatcctaccctacccctccctttgaccactcacccaaccatgtgtatagctgtgctggtgatcccggggcggttattcactggttatcatatcattctaaaatgatctttgatctctcaattaacaactaacttatttctgtttgtttcattgtttcacctcgtaagaggaagttcattgtgcgataaatcaa

SEQ ID NO: 1317 - DNA, 317 bp, Strongylocentrotus purpuratus
  source 1..317: mol_type = unassigned DNA
tgacgaaatgttcaatatatgacattctaatgttcatgtattttttgtttgcttgacaaagctagatgaatatattccctgtcctactacatacatctcgatgtgcccttgctagacgatccattggtaaccatgatatcaatggattaacacatgatctgtaaacaatatatgatttacacaatgtatttattgtttcaataaatctgttcttttcactttaatacatgaaacatgactgtgccttctccaactggagacctacataatttgttaaaatgatataaatatttcgaagatgaaattattattaataa

SEQ ID NO: 1318 - DNA, 134 bp, Trichinella spiralis
  source 1..134: mol_type = unassigned DNA
tgatccgtcccgaaccaacggaaccacattgccgcatgacttcgatttcgcttttgctctttttgtatttaattttgctattaacaattcagtttgttaactgttttgtattcatttgaagatccaaataaaac

SEQ ID NO: 1319 - DNA, 394 bp, Chelonia mydas
  source 1..394: mol_type = unassigned DNA
tgagctggagtgccgatgagaagcgcagtcgggaaagtaactgaaatactttcctcatggattgtattttctaaatggacaacctacctaattctcaattactgagggacaatctccactcattgatatattttgctttccacaaccaaatctctgtacaacttttcatgagtgatgtacccgagtacttggattctaatatctaaactgtattgttaaatctattcacctaaatttgggttattgctgattatgtactctatgtatcatatgacttttaaaaacaaactttgtatttgtggataatctaagcactatacccagatgtacagacactcttttcccaacctatgtattatatttttttaacattagctttaataaaatttttaaa

SEQ ID NO: 1320 - DNA, 155 bp, Phytophthora capsici
  source 1..155: mol_type = unassigned DNA
taagctggtcatttgaccgacagggcactacccaggtagggaaccgcccttcagaaacccaggaagacacaaacaccctccctttagtgacatacatattttaggctacatttcagttacggagaggttactaactggtaaataaaaagcacttt

SEQ ID NO: 1321 - DNA, 1015 bp, Phytophthora infestans
  source 1..1015: mol_type = unassigned DNA
taggcggaaaccaggcccaagacggccgacagggccccacccaggtagggaaccgccctagaaacccatttcggtggtcgactcgaaggccttacctattttttccttagacattcaattaggtagcgaccaaattacaaatttggtaacgagtaagccaaatggtaatacacaaaacttttctgttctaatcagtgtgaaaactggttttcgccttttggcggactttttcactcgcatttttgggcaatcgtctgcggctagcttgctagcggcggacgagcggtctccgggggcgttcacctttcccccgcgaggccaactacaccgatcttctctacacttttctaattcgcctccgtcttcggtcttcggctgtcggatttttttctttttgaccaatcagagcgcgccatgcgactcttctggccaatcagagaccgggccctgtcctcggacagcgaggcctccacggccagccaatcaagtctcggcagcgacgcgtctttctatagcgcagctgacgaggccgatctggcggcccccgattggtccgactttcggccaatcagcgacgacgagggggcaggggtttacacttttgcccccgtttcgacttcaacttcaggccaaaatggcgatttcgaccctccacgcgccgtgccactgctcggcaccggcggcgattcagcgggtgcaacttcgggcacgtgtgcaacacatgcagcgcccattgcacgccaagcggcatcgcgggacgacgcctcggccgctcaagcgcagccccgcccttccagcacgacctcgcgccgtttggcggatcgccatcaagacgtgcgagagccaggcggggtcgggcaaaatatacttactctaagtatgcccgaatccctgccctctcaggctgaacgcggccccatacttgatctaagtatgggagggatccctggcctctcaggctgtacgcgagacccgtacggccgaatcccctggcctctcagcctgtacgcggggc

SEQ ID NO: 1322 - DNA, 380 bp, Phytophthora ramorum
  source 1..380: mol_type = unassigned DNA
tgagcaccttgggttgctcaagcgtgatgcgaagcggctggaccggcagctctcggtggcgtgcatccagtccagccgccgcatctggaacctgcactgcagccagcaccgcgcgcgccagcaccaagcaccagggggaagtcgggcggcggagaccggggggactccgccgcgcaccggccgccgctagacggcacacaggcccacagcggccgacagggccacacccaggtagggaaccgccctcaaaccccgccggtacattatggtccgacacctatgaggtgcaacctgtacacaagttacacaccacatagcgactaccaggtatttactacctggaagccaaggattaaccggtcggtaatacacataacttt

SEQ ID NO: 1323 - DNA, 210 bp, Pythium ultimum
  source 1..210: mol_type = unassigned DNA
taagcggggggtccagaccccacaagagagaagcaggaatcatggtccgcatggaccagtagggcacgctccacaaaggttatcgccctcaaacccatcacacgaaggatctaaaaagaaagcaacaatcgaaatagtaaatagtaaatagcttagaaaggtcaacatgcgaaatgcatgaggaacgtaagatggtaatacatttttata

SEQ ID NO: 1324 - DNA, 1098 bp, Phytophthora infestans
  source 1..1098: mol_type = unassigned DNA
tagacggcaaagttctggcccgcgtaggccgaaagggccccgcccaggtagggtaacgccctcgggaaaaccattctggtgtttggctgtttttcaacagtcgaacttcaactcggagcatatcagatacacttactcacacatttagatatcagatagggaacctttattagggagataacgggtacaccggatggtaaatatacaaaaccttctctgttctaatcagtgtgaaaactggttttcgccttttggcggactttttcactcgcatttttgggcaatcgtctgcggctagcttgctagcggcggacgagcggtctccgggggcgttcacctttcccccgcgaggccaactacaccgatcttctctacacttttctaattcgcctccgtcttcggtcttcggttgtcgggcttttttctttttgaccaatcagagcgcgccatgcgactcttctggccaatcagagaccgggccctgtcctcggacagcgaggcctccacggccagccaatcaagtctcggcagcgacgcgtctttctatagcgcagctgacgaggccgatctggcggcccccgattggtccgactttcggccaatcagcgacgacgagggggcaggggtttacacttttgcccccgtttcggcttcaacttcaggccaaaatggcgatttggaccctccacgcgccgtgccactgctcggcaccggcggcgattcagcgggtgcaacttcgggcacgtgtgcaacacatgcagcgcccattgcacgccaagcggcatcgcgggacgacgcctcggccgctcaagcgcagccccgcccttccagcacgacctcgcgccgtttggcggatcgccatcaagacgtgcgagagccaggcggggtcgggcaaaatatacttactctaagtatgcccgaatccctgccctctcaggctgtacgcggccccatacttgacctaagtatgggaggatccctggcctctcaggctgtacgcgrggaccaagtacagccgaatccctggcctctcagcctgtacgcggggctatacttggtctaagtatgccccggtcgctggcctctgagcccgtacgc

SEQ ID NO: 1325 - DNA, 242 bp, Phytophthora ramorum
  source 1..242: mol_type = unassigned DNA
tagacggcaacactctggcccgcgtcggccgaaagggccccacccacgtagggaaccgccctcgggaaacccagtctggtgttcggccaagaaatgcaccaccaccacggcggaggtgcatttcgacagtcgaacttcaacccgccacatatcggatatagttacagctctagttagacatcggataggaacttcttagaaaattaacgggtataccggatggtaaataaaataaaaacttc

SEQ ID NO: 1326 - DNA, 1036 bp, Phytophthora infestans
  source 1..1036: mol_type = unassigned DNA
taaacgggtcacttgaccgacagggcaccacccaggtagggaaccgccctttaaaacccaggaagacacaaacaccctccacatagtgacatacatattttagcctagatttcagttacggagaggttactaactggtacataaaattacacattctgttctaatcagtgtgaaaactggttttcgccttttggcggactttttcactcgcatttttgggcaatcgtctgcggctagcttgctagcggcggacgagcggtctccgggggcgtacacctttcccccgcgaggccaactacaccgatcttctctacacttttctaattcgccttcgtcttcggtcttcggctgtcggatttttttctttttgaccaatcagagtgcgccatgcgactcttctggccaatcagagaccgggccctgtcctcggacagcgaggcctccacggccagccaatcaagtctcggcagcgacgcgtctttctatagcgcagctgacgaggccgatctggcggcccccgattggtccgactttcggccaatcagcgacgacgagggggcaggagtttacacttttgcccccgtttcgacatcaacttcaggccaaaatggcgatttcgaccctccacgcgccgtgccactgctcggcaccggcggcgattcagcgggtgcaacttcgggcacgtgtgcaacacatgcagcgcccattgcacgccaagcggcatcgcgggacgacgcctcggccgctcaagcgcagccccgcccttccagcacgacctcgcgccgtttggcggatcgccatcaagacgtgcgagagccaggcggggtcgggcaaaatatacttactctaagtatgcccgaatccctgccctctcaggctgtacgcggccccatacttgatctaagtatgggaggatccctggcctctcaggctgtacgcgagacccgtacggccgaatccctggcttctcagcctgtacgcggggctatacttggtctaagtatgccccggtcgctggcctctgagcccgtacaca

SEQ ID NO: 1327 - DNA, 193 bp, Phytophthora ramorum
  source 1..193: mol_type = unassigned DNA
tagacggcacacaggcccacagcggccgacagggccacacccaggtagggaaccgccttcaaacccggccggtacattatggtccgacacctatgaggtgcaaccggtacacaagttacacaccacatagcgactaccaggtatttactacctggaagccaaggattaaccggtcggtaatacacataacttt

SEQ ID NO: 1328 - DNA, 1063 bp, Phytophthora infestans
  source 1..1063: mol_type = unassigned DNA
tgacgcaccgtgacatagtgcggcacgtgaagatgcacatgaagctccgacactgggccaagtgggcggccatgcgcgaccaaggcaagacagctcgtgcacatggtggggttggtagtggcttcctcacacggccgcgaggcctgtgggaagccgactaccggttcgcggtggccggccgcttaaaccaggtagacacgcacagtgtcctcaagcgccggcgcctccgagcacatgacaggtgcagacacccaggatgcacgcgctccgagacgctggcgcatgtgcttaaccactgcgacggaaccatggacgcagtccgtggccggccatgacgccgcactcaagattattgagcgtgcgctcctcgcatcgtcggccgaccagcaggaccgtgctgagctccgcgtgaaccagaccgtgccgtcactcgccggccccgcgctacggcccgaccttcagctctacaaccacaccaagaagacggtggcggtggtcgacctggccgtggcgttgaggagcaggcgagtgacgacgcgagtagctcggcactgtcccggatcgccaaccacaagcgagccaagtacgaccacatcaagctacacctcgagcgccaaggatggaaggtacacctctcggcactcgtgtacgggtcgcttggggcggtcgctagtggcaactaccaggtgtacaccacacacctggggctactcaagcgcgatgcaaagcggctggaccggcagctgtctgcctaatgcatccagtccagccgccgcatctagaatctacactgcagccagcaccggactcgccaacaccaggcgaggcccagccaaggaccaagaggcagccgggcgacggagaccggggggactccgtcccagacaagccgccgctaggcggaaaccaggcccaagacggccgacagggccccacccaggtagggaaccgccctagaaacccatttcggtggtcgactcgcaagccttacctatattttagacgtagcgaccaaattacaaatttggtaacgagtaagccaaatggtaatacacaaaacttt

SEQ ID NO: 1329 - DNA, 415 bp, Phytophthora ramorum
  source 1..415: mol_type = unassigned DNA
tgatgcccgccaactacaaggtgcttactgagcaccttgggctgctcaagcgtgatgcgaagcggctggaccggcagctgtcggtggcgtgcatccagtccagccgccgcatctggaacctgcactgcgcgcagcatcgagcacggcagcaccagggccaagcgccaaggggcagtcgggcggcggagaccggggggactccgccacagagcggccgccgctaagcggacatcgggcccgtagcggccgacagggccacacccatgtagggaaccgccctctaaacccgcccggtacattatggtccgacacctatgaggtgcaaccggtacacaagttacacaccacatagcgactaccaggtatttactacctggaagccaaggattaaccggtcggtaatacacataacttt

SEQ ID NO: 1330 - DNA, 1562 bp, Ciona intestinalis
  source 1..1562: mol_type = unassigned DNA
tagccaaaagatttggtgttcttggcgagctgcagtcccggcagagtaggcgagatcgtgagctctacaccgcttcacgatttgacgagttcttcttgagtcgatccccaacggcaacgcactccaaatttaacgaccgcatggcgacgccactgatctcccagtcatccgtgctccgagggcacttaaggggaaccgattcactgatgctgcaagttggcgggggcgcactcaccaatggaagatgagggagcccaacgatgccccgaactaccgcaccgtccccagcaccgtgtccttgtgagtaattattttcactaatccagggacggggccatgaactgaactatgtctgcacgctgccccgcctagcctcggccacaaataaatagtcaagccggggcgtactaccaattgattcggatttggcggggcccatcacgcgcctccgcccccacacacaaaaacacttttaaactcttcggttccccaaccactacaacaaagcgagcggcccctcttagatccaattttaaaattttaaatcagtgcactcaacttttttacgtgttgtgttttttgtattttttcccacagattttgtatttttatattatattttatatacacaacactatttttatacactaccttgcactgtcccactttttgtaattatcaccttttaccttttatgccgctcgctgagctccttgcacggatgaccagacaaacttttataaaattataacattgttttaattgtcgcggggtatcagtggcgcccccttgcggccgtgaaagcccttttcaccttaattcgccccttagtccaaatttttccccattgcctgtaaaagtgcgttgccgtcgactcgaactcgtcctttttaccgcctctctgttactgaactatgaccagcttggctgttgaagtcggctttaattcgccggcttcacattatatttttttgttgggtaatctgttttttttcatatataaaaccattcggcttaaaatcaccaatccccatcatccaccctggtcacccattgaaacatctctttttagtcaattattttttcagattacccctcccaaattgtcatatagtttaacaccccgtttgccaagttggtcttttccccatccccttctgtccttccggtaatcccataacattttattctttaattcggccccataaatagtgtaatcttaagacgaagtccccagaggcccggtcccccccttctttgtcatggaccgggccagcccccctgttaccacaacaacccaccattttattctttctttctttttattagtatttatttatattgccgcccaactgtcgtgtcgtggcgcaggggggttccctctgtcggcccagtggacgaccgtctaaaaaacaggcacaggcagcaggcacttatcacccggtacctccgggtaccggaggctggttttcagcgcactgtacgtgatggccaattttattcattgcattttatccgcgtcgtggtgtttgcgtggatgcattaataaaagatgaaattcc

SEQ ID NO: 1331 - DNA, 602 bp, Schistosoma mansoni
  source 1..602: mol_type = unassigned DNA
taacggctgaacgaatagcccccttcactcttagacattcccccactgttgttgcttatcttcatgctcttgtgttaattgactgctctcttctgggttgacgtctgattgtctctctctctttccatattgcttgctctgcccgcttacttccaatagttgtcatattatgtctttgtttacttgccatgtctaacgacaattactttatctaccttagtttgtcctcttggtttcgattgccttcatatgttcatggcggaatctgatgtttataatgactattcctattaccaccactacaactactattattattttcattactattaacattattataaacattattactattattattattactattattacttctacaattaatattatggctactcctctcagcacaccaataaaatatcaatcaaacatctcaattatatccacctattaaactctctctatttcccctgagttataaacttacaattcagtctaaccgaatatctctcttttacaaatcttaagtatgtaattttgtgccaaacccatttgggtctgtacaatttgatacttaaaaataaatgttattagcc

SEQ ID NO: 1332 - DNA, 90 bp, Bombus terrestris
  source 1..90: mol_type = unassigned DNA
tgaaaacacgataacgattatgaatcaaaataagaaagtaaacatcccagaaattgtctacgtcttatttgttatctatttatttgttta

SEQ ID NO: 1333 - DNA, 1815 bp, Crocodylus porosus
  source 1..1815: mol_type = unassigned DNA
tgaatcccactctggggacccccaaaaattagaaaaacccaaaacagttgtgtttaagtgtgttcttgtttgtccctttggcttcacctccaagttgcgatcccccatctcccctgcgctgtctttctgaatgaccagtggtgttgaggctggtgtgacctcggtcacctccaaggccaagtgccctggccccgagtaggaccaggtggcccagcttgctgggcacccgtcaccgcccagggcaaatggaagggatctatcctgaccactaccaggctaagtgtggtgctgcctagcctgccgtaaggtcaagcgccctgctgccgctcgggtakcagtcctcgttcactcgtccctcctagtaccctccgcmtctgcgcttctgctatccactgtggccggwgatgccgaggwtgswmcawcctcgacacctccagggccaagcgccttggccmcaggtaggacctggcacctgcccagggggccagacactgcctgcggcaagggaaagggagccgtccctgaccgttaccgggcttgatggtgctggctagcccgccgtatgtcaagcactccacagctgctcgagttcgctggcttcaccttcatcccwcctagtgccttccgcctctgcgctattttcgtcccgactcgtacctccccacctctgcgctacmgctatccctgmaaggaccaagtgggcaggggsgttcgccccccgcccgcaggaggctcggcgtatccgtggcktcwtgcctccaccgtcttgtgccgctagaggggtacctcmgagaccggcgcaacacgaccttgacgsttagacagtagggtgmaacakccctgctgcaggcstgaagggccaaacggctgtgccatgagaggggaaccttgaagaccgggscagtcagccagttagtcagttgggcgaaacaatcccagctgcaggcccammagggctgtcaggtgagggggtatccccawccaccccccgccgccgactacggaggcakgaagtccctagtgacttckgacccccacgtcttgtgccgggagaggggaaccttgaagatcggggcaagccgcacttgatagttagccagtckggtgaaacaatcccagctgcgggtccgaaagggccgactwccaggcgaggggggcctgcggaaamccccctccatggtacggagktctggcgtcctmaccgacwccttgccaccaacgtcttgtgccgggagaggggaaccttgaagatcgggscaagctgcacttgatggttagtcagtcgggtgaaataatcccagcwgcccccgctgtgactgctaagmcwggtccccaaggggcatgaggcatstgcgctgagccggsaggggtgacacmcggcgatcggcgcagcacakastgaagggaggcacttgctgagactgcttctgaggccccagacttggggtggtgcagccttgtctggggtatggtacagcaccctactgctccctttggkcagcagaattcgtcccgacctcttacccacccgagtctgcgccttgttccgctatcctgcatctccgatccacctcgctgtctccccgctgcgctgcttttctctcaagtgggttaaatcttgtcatgattacctcccacgtttccgctcaagggcaatgcccaamatgacggggatcgctggtgcatggcagtcatgagaccatccggaccctccggtggtcgctatagtcattttktgttgcatggggcatsctgagtcacttaaccgaaagactcwaaataactcaaaagaggkamcctctgsggttcggtaaa

SEQ ID NO: 1334 - DNA, 236 bp, Drosophila willistoni
  source 1..236: mol_type = unassigned DNA
tagatgtactaacctctagcttttcttatacttttgcctgctaccttggcattacatctaaaaaggtacaaacatcgcattgtcataaagaggtggttttagtacgtaggcgctgtgggacttcattgtcccggtgatgcagtgaatcgtgcatacgagattgtccagtagttggttgctcgtatctttagaagatttccttcctcggcgatcaaaaaaaaaaaaaaaaaaaaaaa

SEQ ID NO: 1335 - DNA, 2018 bp, Gavialis gangeticus
  source 1..2018: mol_type = unassigned DNA
tgagaagttgcgagttcttatgcaagttgaataccactctkgkgaccccaaaaaawwaaaccccaaaacagttgtgtttaagtgtgttcttgttcgtccctttggcttcacctcsaagttgcgatccccccatctcccctgcgctgcctttcagaacggccggtggtgtcgaggctggcgcgacctcggtcacctccaaggccaagtgccctggccccgagtaggactgagtggcccagctcgctgggcacccgtcaccatctggggcaaatggaagggatctgtcctgaccactaccaggctaagtgtggtgcggcctagcctgccgtaaggtcaagcgccctgctgccactcaggtatcagtcctcgttcacttgtccctcctagtaccctctgcctctgctcttttgctatccactatggccagtgatgttgaggttggtgcatccttggtcacctccagggccaagcgccttggccacaggtaggacctggcacctgcccagggggccagacactgcctgtggcaagggaaagggagccgtccctgaccgttaccaggcttgagatggtgctggctagcccaccatatgtcaagcactccacagctgcttgagtttgttggcttcaccttcatcccacctagtgtcttctgcctctgcactattttcatcccaactcgtacctccccatctctgcgctcctgctatccctgcaaggaccaagtaggcaggggggttcatccccctacctgcaggagactcagcatatccatgacttcttgcctccaccgtcttgtggcgctagaggggtacctcagagaccggcacaacatgaccttgacggttagacagtagggtcaaacaaccctgctgcaggcccaaagggccaacagctgtgccacgagaggggaaccttgaagactggggcagtctgaccatgctggttagtcagttgggtgaaataatcccagctgcaggcccaaaagggctgacagtcaggtgagggggtatctccatctgctccccactgccaactacggaggcatgaagtccgtagtgacttctgacccccacgtcttgtgccatgagaagggaaccttgaagattgggacaaaccgcacttgaaagttactcagccgggtgaaaataagtcccagttgcgggcccctcggggctgacagtcaggtgaggagggctgcaaagcccatctcctgactccagaggcctggcgtcctaaccgacttcttgccaccaatgtcttgcgccaggagagggcaaccttgaagatcggggcaagccgcacttgatagttagccagtcgagtgaaacaatctcagctgcgggtccgaaaggactgacttccaggcgaggggggggcctgcggaaaaccccctccatggtacggaggtctggcatcctaaccgacaccttgccaccaatgtcttgtgccaggagaggggaaccttgaagactggggcaagccgcagttgatggttagtcagtcgggtgaaataatcccggctgcaccctgctgtgactgctaagcccggtccccaaggggcatgaggcatgtgcgctgagacgggaggggtgacatctggcgatcagcacagcacagactgaagggaggcacttgccgagaatgcttctgaggccccagacttggggtggtgcagctttgtctcgtgtatagtacagcaccctactgctccctttgggcagcagaatttgtcctgacctcttacccacccgagtctgcgcttttgttccacctcgctgtctccctgctgtgctgtttttctctcaagtgggttaaatctcaacatgattatctcccacgtttccgctcaagggcaatgcccaacatgacggagatcgttggtgcatggtagtcacgagaccatccggaccctccagtggtcgctatagtcattttgtgttgcatggggcatgctgagtcacttaaccgaaagactgtaaataactcaaaagaggtaccctccggggttcggtaaa

SEQ ID NO: 1336 - DNA, 437 bp, Ixodes scapularis
  source 1..437: mol_type = unassigned DNA
tagtgtgacggagtcctcaagcccccacaagtgcctgccaggtggcaggaaagggcaactactggtgagcgacccaagcaaggcggagccaagaccaagctggagccaagagcaactccaggaggcaggggtggatatcaagagcaaccccaagggacacagaccacgggcaactactggtgagcgcccaagacaggggtggatattaagaacagccccacaaagtgttacctatattaacaataaagttgaagcctcaaccacgcattgcgggttagatggcgtggcttggcccgccgccatgatgagctggaaccctccacctggtgggccgcacgagaccaccggctctttctactaaggccggtctccgtgactgcggttgggataaactccaagcactgagcggtaaaaaaaaaaaaaaaaaaaaaaaaaaa

SEQ ID NO: 1337 - DNA, 970 bp, Mnemiopsis leidyi
  source 1..970: mol_type = unassigned DNA
tagtgacgagaaaagtcgctttatccttacataacagtgtgatagtcatccttatcacaactgtcctggcgaacaaaatggcagagggatagtactcggtccaaccagaaggaagcccacacgatgccaaacttgctgtaacccacgtgagcggaaaacatcctccgagtatagtatgatggaaggatacaggatgtggaccgctctaggcggcggacggtgtagacggcgaccttaccatagctgcgactgctgtgcgatccggaacgggcctttctcacttacctcaagcaccgtgtcggatcgcggggtgggcgcgggattcctgctgggaagttgtctgcacccaagtcgtcagctaactgtcggtacttatacgcacccagagccatgctcttaccaggccacttgacggcgctacaccggtctgtaggagggtatctcagcgacttggacaaaatggatcttgactgcctgagggcgcttatcgagtgacccagagtaagctggtaggaagaatcttgcagttgagagggctagtagggccagcctctgctcgtcaactgtcctaggcgttaacgtgtgcctccctatgaggtaaccgtgaagtattacttgtttccctgtagagaccatataactagctgagaaacgccctgcgggttaatatacagttaccgccgtcctgcatccccgagttgtgaccagcgtacagccatgtaccacggcacttccagcattctctggtctaagaatgtatcagctggcccgccgaaagatagagcgaccccgcctctatcactagagtaagcaggcacgcgaaatatatgcaggacgccttggctcagtagctctggtactgagtatagcatggctgaacgcccctttaagttcggtggcccagagactctccgagacttcccagtcctggagagggtacacctttaccagaactttctgtggtcggttg

SEQ ID NO: 1338 - DNA, 153 bp, Petromyzon marinus
  source 1..153: mol_type = unassigned DNA
taatttaaggtaaaatcgtgggattgttttgatggcaatctgcctagtcgcggccttccattttgggtaggcagcagacccatctatataacaaactactttgcctttcataggggtacccgaccctaccaactttcggggaagtaaaagaaa

SEQ ID NO: 1339 - DNA, 1231 bp, Schmidtea mediterranea
  source 1..1231: mol_type = unassigned DNA
  misc_difference 260: note = a, c, t, g, unknown or other
  misc_difference 446: note = a, c, t, g, unknown or other
ggccacgcgcgtcgtccttgtttgatcactagtggatcaaccttcgactccccggaactgtgggagtggcggaagaaaggccagaggatgtcctgaaaccatatatttatttatagaagttttacttcatcctatttacgtatttcagtatgaaaatgagtaaagttctcgactcgatgagttgggggcaaccattgggggtcctgaagagaggctctcactgtaaaaaatctcttcgtgtctgtttattcctaggcacntgctgcattatgaagcggwgaaagtaaagttagagctgagagataggtacttgctgcattatgaagcggagaaaggcctcgaataaatagggtgttagagttattgatggagagtatactagtaagcttaagctgcgcctcgcgcggtgcccaaaaatatacttaatgagagcaataactcaaggngagtttaattcatatgcgcatgcggcaccaaggtgctgaatggcatcgattaaacctctcctgttgtagaagcaggtcataaatggaggrgggcaaccactgaaacttatgagccagaagaagcttaactacawaagttttaggcaattactgaacggagttaactgttagttaacactaccatgtagttgtttataaagcaaatatcaggtttcagtctatatactaaaagtattttttgataccgtggtatataggcaactagttaggaaatagtaagggatgacgcattgtctctctttatggtactgaggaaacttatcgactcgcgagggatgaaacccgtaaaccgatcgatytagcctataagtaccagcgacagttaaaccatcttacgcgaggggtaaaacctgaggaccgattatggtataacttctcaagattagcacaaaatgcgagtgcaacttgaggaggaggatttgagtgttaattcataatgtactaatctaattaaactgtgacgggaattgcagcttcggctgtaattactttgaggcctatcacggattgtaaggaacatattgacaccgtaagtctaacgtgttcccgatttccaaccaggtcatatgaagggctgcccttgataaggcggatttgacccaattcttcatatgagaggcttattccagccttcccgtagtaccgtgaggttttcccgcctcgaacggaacaatgttgcagggtaattaagtacatcgggctatatmgcgatatttaacgtttta

SEQ ID NO: 1340 - DNA, 813 bp, Strongylocentrotus purpuratus
  source 1..813: mol_type = unassigned DNA
taaaccttgcctccccgggcccccctcagtgactaagacaactttcaccgtaataatcatatatttgtataccatgtattaatctaggtaacaattgaaagtaacattgaaccgtattcatactttaatgagtacaatagtgaagggaactgtatattacatacctcgagatagaggtttttgtaccttaagggttcgtgagaatccatactgcataaaggggttaacttgtaactcaaccccagggagacaagccgacaaattcggcattactatgtgagggtcataagtgttaaaggacccattgtatataacttgtaaatgtacagagaattcgagttgagttcgaagaataaacaaacaaaaaagaaaacaaagagaattcgttcgtccatagaagcggaaaaagcgcaaaaaggcgtcctaacctcacggtctaacccagaaacatttaaggggggaaggagctcattactccaatccaaaaccacgttccctagcccaaaagcgcgcttcaatgagggagccgatattggaggacagagttcatcaaaagccacctgtaagtaggcccatttctgccaaggacatgcgcaaaaggaagcagattatcaaaccagtcaaacaagcacaaacattggggggatgggataaccccggaaagagagggatctttagatagtggatggaaggggtgggacgttgaatccaaccatgccgtttttatgttcccgataaagaaggataaggtcactccagcctgacacacaaagtggggtaaaagaactccgctcgtacggactccaaatagaa

SEQ ID NO: 1341 - DNA, 2663 bp, Salmo salar
  source 1..2663: mol_type = unassigned DNA
tagatccgtttgttatgattggagggagcctgccgagtggtatgagcgctccaactattgaacccatatgattcccgaggcctggccagacgcctagatgcctgccacaattgaacgcagccctagcttgctaggagatccataggaactggcctatggggcgtcatgacggttgaagttcctccatagcgtgcttgggaggggacgacaatgacgagtcatgacgtaccgagagaaccccaacccaggttgggggagagagccagcaagagcggagatgcttggtataccaagctagcagagagagggttgaagaggatgactactgggctcagagtcatctcaccctaaaaggcggtggggcatcggttgaacacctacccataccgggatgggaggtggtaggccgaaaaagaacaggaagatggtggagtaagttgagagcggttgctcgggaagttatgttgtgataactccattaaggccggtgggcatggtgcggataatggaaactataaaaacaataaaaagaaagaccaaaaaaatgttctgttatgatgccttacacatgtctgggagaccccataagggtctccccttatacttcactgggaaaccccataagggtatccccctatatttactgggagaccccataagggtctccccctatagatgtagagcgtaaggggtctccaaagtaccggccgatatggccttatggcaaactctggtggtagggacaaggaggtaagggcagtgccaacccctacttgatcgggaccatccagggaatgccatcctcccgcgaaggtgatgtggtgaggtaaggggggagcccgtcttcgagtttccccaacccctacccacaggtgagaggaggagaagaggaatctgtccccaacgggaggagggtgaggtgtaagggggagaccttctagtagggtcttctcagtcgcctgacgtcctgactgtggggtggatcagtaccctacaggtgagaccggtgaggtaagggtgtggccctcttgagggctgcgccaacccctactcgaggtaacctgagggagtggtggaatggcggcatgttagtgctgggacttgattgcgagggtttaatgagagtggcctgctgagagcaacacttgtggtgcttaaagcggggcggcccatgaccaccgtgagataggacactgcacagtgcagccatgaggttcctggaggatgatgcgatgaggtgggggcctcatcagcccctcctggcagggcgtcggccagggaaactaaatgtctctagcatgtcagtgcagtgaggtaaggggagagcactctagtagggctcttccaacccctacctgtaggtcacctggtccaggtgtcgatgatgtgaaaacaagagctactttggtaccggtctgttgcaaaaagggttctgcagaggacgacggctatccctatcgggagggaatagtcggtcccaggtagtggaaaatggggctttccactgagcatgaaaatgtggtagaggttgcgtccaacccaatgatttgcagcagagctcttggacacgaagtctgtatagtcccatgcaggcagccaaccagagaatggtggcaagaccccagctccgtatgggaggggagggccaagatatacggaacggctgctaaagcgttctgccggtgtcagtctaatcacagacagctgtgacgaaacaaagtatgggttccgacatgcttggtcagctcttagccgcaaggcttaaatcgaacgcagcccgccgagagtgaacattaaacggggatggaatgtgtctagcggttacgtactaccagggctcaggttcgcctgagccgaggctctacacgtcatggtgggagttctccccacgctcgtgagggcatgtagtgggatggcatgtggcggaccatcagctggcactaccaggcctcgggcttgcccgagtgcgggacctcacacattgtaggtgtgcttgtcccccctacgttcgaagacttgaggcggagaatactcataggccccacggcaaagggacacaacacggaggcttgtgtccgacgagccgtggactcctatagacagcccgggatatcactgggcacgctcatactgaagaaattcgatgaaccgggcctaccggagcaaatgcactctaatcgcctttgtgggcgactgtggccccctcatgcgagtgaggaatatcataaactgcaatggttcaaaaagtgattcctatggctcgtcggggagggctgactggggcaagcaaatgattgaaaggggaagaacctttttcaactgtttcttgccaagcccggttgatggtggcgctagtaattgcgacgggaaaatgcggtttaagtctccgaagtagtgcgtagcaccggatgtcgaccgggtgtaaaagcccttcgtaaagtccctggggaggtcagtcctggggctactgatgcgcagtatgtaattcgcagaatagggccatcgataccgcctgcgtgactcgactgggtttccacttgaggatatccgaccgtagcgtgcaccctcttgtagttgcgccggaaacggctgtgttccctcacgtatgtgaggaaactcaacaatgtgagtgggtaaacggcgggacgaactatggctctcgt

SEQ ID NO: 1342 - DNA, 155 bp, Tribolium castaneum
  source 1..155: mol_type = unassigned DNA
tgaaaagagtggcagttgtggagacttccttcggacgtcgggtcggattttcggacgccagggtacctccaccgctgggttcacaaactaggcgaacatctgccgataccctctttaggtcataggaccacatgtctctgcacgagattaaccca

SEQ ID NO: 1343 - DNA, 398 bp, Tinamus guttatus
  source 1..398: mol_type = unassigned DNA
  misc_difference 100: note = a, c, t, g, unknown or other
tagggggcttggcatttctcattgcctgctcctgaaaggatatgggtcctgcgtcgcgtggtaggcagacccattcgtccgagtagggggcttggcagtntccattgcctgtgcccgaaaggacgtgggtcatctggtctgtctgcctacacctctctagacttgtaacatctagtctgtcaacaagatcaaaattcttcacacagacgaccgagcttgctcagtcttcctgtacccgcagaattttgctcttgctctcctttggctgtgtcctggacgtgggactattccatctcgtcccaaatgccgcgtccaattataccggatttgacaaagcggacggcccgctttataagccggaaaaggtgccttgtaaaattgcaaggttcattaaatag

SEQ ID NO: 1344 - DNA, 304 bp, Trichinella spiralis
  source 1..304: mol_type = unassigned DNA
tgaggtttttgttttcttttttccttttaccattcttgttccattgttgttatttgctttaatcctgtattttaccgccggcaattccattgttattattactgttactgttattattgttactattgtttttacttttacttactactgttattatactttaattcgttaacttacgttattgttaccactacttactttgctctctcgcaaacgttcgttgttgtttcttttggaccaggtttagagaaatcgcacgcacagcggaactggaccgcttaagccagaaatagtaaagtaacaa

SEQ ID NO: 1345 - DNA, 155 bp, Tetranychus urticae
  source 1..155: mol_type = unassigned DNA
tgatgtatcccttcaatatattgtaatcctcattcgtccctatcctttcatttgataaaagaaactttgttgctccttttaatagttggtccctcctgtcccttttctggaacctggttgtatcgattattgaaagttgcaataaacggatttaa

SEQ ID NO: 1346 - DNA, 235 bp, Drosophila willistoni
  source 1..235: mol_type = unassigned DNA
  misc_difference 217: note = a, c, t, g, unknown or other
tagatgtactaacctctagtttctctatacttttgcctgctaccttggcattacatctaaaaaggtacaaacatcgcattggcaaaaagaggtggttttagtacataggcgctgtgggacttcattgtcccgatgatgcagcgaatcgtgcatacgagattgtccagtagttggttgctcgtatctttagaagatttccttcctcggcgatcaaaanaaaaaaaaaaaaaaaaaa

SEQ ID NO: 1347 - DNA, 162 bp, Petromyzon marinus
  source 1..162: mol_type = unassigned DNA
tgagaataatgaggtgctaacctccctgggcctgaccaaacccagaacacatcactggccaagatgatttcccgcagcacgttgcttttctctctcgatacccgagaatgttctgcggaactacgcagtctatgaacagtcacagacaacctctgatccaag

SEQ ID NO: 1348 - DNA, 257 bp, Schmidtea mediterranea
  source 1..257: mol_type = unassigned DNA
tagaagggaaacaaaggaaaaacgaaatgactggaaactatgaaggatatagctgaaagccgcaaggaaggctaagtcctgaaaccgatctacatcttcgatcccaagaggaactgtgggttaagcttgagccgacggaaaaagcgaatgcatgttagacgacgaggtacagtcacctcctcgtggtatttggcgggcaatgctcactaaattaactgtgagtagctgagaactgtatgtgtatcatgaaaaaaaaa

SEQ ID NO: 1349 - DNA, 233 bp, Tribolium castaneum
  source 1..233: mol_type = unassigned DNA
tgatgctcctttggttttaccatctgtgggggcatcggtcctcacggtttcctcgggtttcctattgtttttcctaaacccgacaaggagccctttggccctcctccttaaacacctctccttcatcctsttagtccattccggctaaaatgatgaagaccgaggagtgtcactctcttggcggggttaacccgtccaagtgtaaatgtgacctcgccattcgggctctgata

SEQ ID NO: 1350 - DNA, 214 bp, Megachile rotundata
  source 1..214: mol_type = unassigned DNA
taaatgtcgaaccgaattttgggtaacgtgcaccccaccatccttaatcggcagcacgcaataaagccgtgggcagtggttttagtgggtagtcattaggagtcccacagtacccagcgaacatcttagtgggtctgcgtaaacgcatttccactgcctatcctccgggaaaaaaaaaaaaaaaaaaaaaaaaaaaaaaaaaaaaaaaaaaaaa

SEQ ID NO: 1351 - DNA, 508 bp, Apis mellifera
  source 1..508: mol_type = unassigned DNA
tgatcgttaaaagtaaaaatctatttatttatttttattcctatattataacacattatttatttatttacttattgttttaaagatgacgaagccgcaaggccaatccaaatttaacaaaagaacgagactactggtcgacattaaaaagacgaagcagctgccagctgataaacaacagagcccgtctcggcctttacaccgagcggtgcaagtcctgacgtactattgtacgtctagggcgcggggcagattctaccgtgtagaatctggggcgacgcctccgcgaggcactccctggacaacgtacgctaaagcgtacggctaagtgcgcctcccgaaagggtccccgttcctaatttttccgagcccgcgggcagatctcgtggcagtgacgctagaaagttaagtccgcggacatataaaattacagccttaaataatgaaccccacgaaggaggtatcctcgaaattccgccacgatccttctgatcgtaggcgcaaaaca

SEQ ID NO: 1352 - DNA, 696 bp, Nasonia vitripennis
  source 1..696: mol_type = unassigned DNA
tgacctgaacaaaacgtgttgtcttgtcttgtctaaaactatttattcgaaataaggggaggctaactgcctgcaagttgaacgcgaaagttagaccttcccacctaaagcccaaaagtgatcggggaatgaatccgcgggtgaccccagagttgggtaaacccttgaaacgttggagaagcggaagagagtcccgccaccgagcatcgagtgctgcggcgcccgaatgaaaccgatcgcggatggtgcaagtcgtaggacggggcacgacctaagcctctgtcacggcggcgaagccaggaatcaccatgcaaaggtgtgaactggggcggatacctccacggggtttccctgggcatcgcgcgagcgatggccaaagtccgctttctcagctacaaaacaaaaatggtatgagacttcgttaacactaatttttccgagcctagcaggctcccttgacaacgcttatgaatctggaaaaggacacaaagtggaaaaagcgctgatggtggacaaaagtcagttgagacttgatatcagttgttttgactaagaattttattatcgttgacttttaaatattttattattgactgttaatatactgacttgggaccaagtcatctctgttacccggtaccggttcctgtcatcaaaccggaaagtccgtcccacgtaatgtggtagacgcaggag

SEQ ID NO: 1353 - DNA, 122 bp, Ciona intestinalis
  source 1..122: mol_type = unassigned DNA
tgacagtaatatgaaaacatcacatctgaccggcacagaatcaccatgccgtaatgcacccaactaaggattccaatgggtaaaaaaaaaaaaaaaaaaaaaaaaaaaaaaaaaaaaaaaaa

SEQ ID NO: 1354 - DNA, 112 bp, Nasonia giraulti
  source 1..112: mol_type = unassigned DNA
tagcggactggactgtctggaggagtgtttaactcgggttctcatgggaacccgacaacgttgttatcttgtatgacaattcataaaaaaaaaaaaaaaaaaaaaaaaaaaa

SEQ ID NO: 1355 - DNA, 345 bp, Lepidurus arcticus
  source 1..345: mol_type = unassigned DNA
tgataatcgctccatcctgcaactaattatgaatgcaaatctgttaagtgacattagtgatacttacctgatacttaccctggtatttatttgacctatacttaccctggtatctacctgacatatatttatctaaccacctacctatgatgactcccgcggaaactctcacttaccttattacccacttggtcttttattttctcgttccttattactttgttcctttggtgtagggttctctggtttttggaacggcttccttagccggaattttgtctgatgtatcttgcttgtgtccttgaaatatacgacccaggcttgcgtcatttaggctctgggaaa

SEQ ID NO: 1356 - DNA, 380 bp, Lepidurus couesii
  source 1..380: mol_type = unassigned DNA
tagtgcttgagtgatgcctatcctttctttgattaactcttaccatatacttaccagttcttacccgtacttaccctgtatacttacctgtgtgcgtacctgtgtacttgtcctttagccgccttgtgtttttaccattggtacttaccttgtgtggttgcccgatacttaccttgtatttgccttgtaattctgcatgatatttattgtgtaggttcctgatgcttacctgatttgtccccctcatcatctttagtttcgttctatttcactccattatggagttccgtttgttttttggtggaggtacagcaccctttaagctggaattgagtgagtttatgtactttggatggttgtaataaactacccggaggcat

SEQ ID NO: 1357 - DNA, 345 bp, Lepidurus couesii; identical to SEQ ID NO: 1355
  source 1..345: mol_type = unassigned DNA

SEQ ID NO: 1358 - DNA, 324 bp, Nematostella vectensis
  source 1..324: mol_type = unassigned DNA
tgatggtgggttactcgcctctgtgtaacaggcaaatgaaagctgcgcaagcagtcgatgagccaaagccgcacagcccccgactggggtacagggcagccctgggctatgcccgaagtcttttgacaggtccaaacttcacccttgccgccagtagggcaccagggccaggtgcaggtgggcgctttgttctatttggtttcgcttaatttttgttaaatttttcccgtgcgcccaccctttttaacccttttaacaccaattttttttacaaccctctactcaataatccaaatgaataaaagcggcataacaggtgaacac

SEQ ID NO: 1359 - DNA, 533 bp, Schistosoma mansoni
  source 1..533: mol_type = unassigned DNA
tagcccccttcactcttagacattcccccactgttgttgcttatcttcatgtttttgtgttaattgactgctctcttctgggttgatgtctgattgtctctctctctttccatattgcttgctctccccgcttacttccaatagttgtcatattatgtctttgtttacttgccatgtctaacgacaattactttatctaccttagttggtcctcttggtttggttgccttcatgtgttcatggcggaatctgatgtttataatgactattcctactaccaccattacaactattattattatcactattattaacattattattacttctacaattagtattatggctactcctttcagcacaccaataaaatctcaatcaaacatctcacttattaaactctctatttccccttcgttataaacttacaattcagtttaaccgaatatctctcttttacaaatcttaagtatgtaattttgtgccaagcccatttgggtctgtacaatttgatacttaaaaataaatgttat

SEQ ID NO: 1360 - DNA, 314 bp, Triops cancriformis
  source 1..314: mol_type = unassigned DNA
tagatgactgccctacccctttgctgccgaagaactactgaagactattgaactaaccaactgtgttaagtaagaactaatgcctctttttccctgcatgtatcccctgatcagtgacttattttcttttcctgttgcgccctttgtttagttatttcctttaattactagaattatcttttcgttctccgtctaattgctttttcggtgtaggaacggctacctaaagctggaagtgggaagtgttttcaatgtactttgtgattatagaaatatatgacccgaggtgcattgtttggcatttcctcgagaaa

SEQ ID NO: 1361 - DNA, 256 bp, Drosophila ananassae
  source 1..256: mol_type = unassigned DNA
tagccaatgcacgggttccagattaagcttgctgccgaagcataccatcaaaatcggcataaaattcgcttaataaaggaggtggttttagtacgtaggcgtcccgggacttgtctcgggatgaatcgtgcatgcgtataattgggatcgataacaaataccaactaagttattactaatatatcgaaatacataaatatcccgtccttacgtatctttgaagatttccatcctcagcgaacaaaaaaaaaaaaaa

SEQ ID NO: 1362 - DNA, 256 bp, Drosophila melanogaster
  source 1..256: mol_type = unassigned DNA
tagctaaatcgtttggttcaaaacatttgcttgctgtcttggcataacatcaataaaggcataaacatcgcaaaataatggttataattaaatggctatgaggatggttttagtacgtaggcgttgcggaacttcggttcatatagagcaatgaatcgtgcatgctaggaaaactgaccacacacagtgttggcagacctagtatctttcgaagatttccatacctccgcgatcaaaaaaaaaaaaaaaaaaaaaa

SEQ ID NO: 1363 - DNA, 203 bp, Drosophila persimilis
  source 1..203: mol_type = unassigned DNA
tagcctatacactatgttggagagaagacgcttgctacctaggcaaaatgtgaaattaggtataaacatcgtggttgtaaaacttgaggtgggtttttagtacgtatgcgtgattacttcgtaatcatgaatcgtgcatgctagtggggtttggcctccactagtatctttgaagattttccttcctcagcgatcaaaaaaaa

SEQ ID NO: 1364 - DNA, 219 bp, Drosophila pseudoobscura
  source 1..219: mol_type = unassigned DNA
tagcctatacactatgttggagagaagacgcttgctacctaggcataatgtgaaattaggtataaacatcgtggttgtaaaacttgaggtgggtttttagtacgtatgcgtgattacttcgtaatcatgaatcgtgcatgctagtggggtttggcctccactagtatctttgaagattttccttcctcagcgatcaaaaaaaaaaaaaaaaaaaaaaaa

SEQ ID NO: 1365 - DNA, 247 bp, Drosophila sechellia
  source 1..247: mol_type = unassigned DNA
tagctaaaacgtttggttcaaaacatttgcttgctgtcttggcataacatcaataaaggcataaacatcgcaaataatggtaatatataaattggctatgaggatggttttagtacgtaggcgttgcggaacttcggttcagatagagcaatgaatcgtgcatgctaggaaactgaagtgttgacagacctagtatctttcgatagatttccatacctccgcgatcaaaaaaaaaaaaaaaaaaaaa

SEQ ID NO: 1366 - DNA, 258 bp, Drosophila simulans
  source 1..258: mol_type = unassigned DNA
tagctaaaacgtttggttcaaaacatttgcttgctgtcttggcataacatcaataaaggcataaacatcgcaaaataatggttatatataaatggctatgaggatggttttagtacgtaggcgttgcggaacttcggttcagatagagcaatgaatcgtgcatgctaggaaaactgaccacacgcagtgttggcagccctagtatctttcgatagatttccatacctccgcgatcaaaaaaaaaaaaaaaaaaaaaaa

SEQ ID NO: 1367 - DNA, 242 bp, Drosophila yakuba
  source 1..242: mol_type = unassigned DNA
tagcttaaaacgtttggttcacatacatctgcctgctgccttggcacaatatcaaaaaggcataaacatcgcacatattggttatttacggctatgaggatggttttagtacgtaggcgttgcggaacttcggttcggatagagcaatgaatcgtgcatgctaggaactgaccaaataacagcagccctagtatctttcgaagatttccatacctttgcgatcaaaaaaaaaaaaaaaaaaa

SEQ ID NO: 1368 - DNA, 221 bp, Kalotermes flavicollis
  source 1..221: mol_type = unassigned DNA
taatgtcccttttggcttgcccccacctgcttaaaggaactggcaggaaagagagtgatccgtgccatagaaatatggttatccggggcaagtcactagcaatatgggacttctccgggtccgtgcggtccttccaacatgagctggacgtagtccactctatgacttgaacgatacgggggcgtatctcccccggaagaggtcgcctaggcgacttagaa

SEQ ID NO: 1369 - DNA, 289 bp, Reticulitermes lucifugus
  source 1..289: mol_type = unassigned DNA
tgagttagatatatatgacgactgattcttccctaactaaaatataatttggaatgtgcattacttatactttattgtatttattgacatccgtagtagtctgtttagtggatttagatcgttaaccattctgtgacgtcgctgatgtctatatgtaccagtggcagaatgctgactaagaacaaaataattttaaacaatagacagcactaagaaattctgcaaactggaacgtggcccacggtaggccaatataccggaaagggaaaatgacacatccccccttaaa

SEQ ID NO: 1370 - DNA, 289 bp, Reticulitermes urbis
  source 1..289: mol_type = unassigned DNA
tgagttagatatatataacgactgattcttccctaactaaaatataatttggaatgtgcattacttatactttattgtatttattgacatccgtagtagtctgtttagtggatttagatcgttaaccattctgtgacgtcgctgatgtctacatgtaccagtggcagaatgctgactaagaacaaaataattttaaacaatagacagcactaagaaattctgcaaactggaacgtggcccacggtaggccaatataccggaaagggaaaatgacaaatccccccttaaa

SEQ ID NO: 1371 - DNA, 312 bp, Rhynchosciara americana
  source 1..312: mol_type = unassigned DNA
tagaaatgtgtgcgataaggtgtgaatagaagggttcaccaagagggagacctagtttggacctcagaaatggggtcataggagtgataggttgtaaagccgttggggaatccggctacacatggtatctcaggagccattcatgcgctgatctcattaaggcgtaataaactgtgaaacagatcctgataatgccgtgctaccaaatgatgtaacgaggcggaaataaaattaatctggggcgttctgcggaatgactactaaatatagcgatgctatatatacaaacgactgatggtaacaccggcctta

SEQ ID NO: 1372 - DNA, 1206 bp, Ciona savignyi
  source 1..1206: mol_type = unassigned DNA
  misc_difference 1079: note = a, c, t, g, unknown or other
  misc_difference 1181: note = a, c, t, g, unknown or other
taagatccgcggctgtggcgccgaacgagcacctgcccattcttcttgtagggactttttcaccctcactccccccaatagttttttttcgttttttcgttttttcacccccaccccactcgcctctgggctgcacatcccacacgtagggacctgtttatattatttgccttttatatgtaccactttttaaatatatttttgtaccccacaagatgcttttcgccaaaaaaaaaaaatttttgtatcacatttttatattttgtaaaacacagatttttataaactttgcactatttttatataaacttcgcacttatttaaaatgaatcgcatcttttttatatacaccaacacaaacaggatgtgcagctcaggggaaccaatcctgcgtccctcctagcggcgggaggggcgcccacctacccccacgctcctcttgagcaccaacagggactcccttccggagcccctgcaccctcaacttttcttatttttaaaaaaaaaaaatcatatatattgatcttgacgacgggggctacattcagcccccaaaaacccacccaccatccccaacgagtgccggggcattgaagagctccggcacaattagcacttagcttatttattattttttgtcaacatttttgttttttcaaattttttcacccctcacccccaccctaataggtccctcgggcttgggcccctttttcgtgctcgagaagcgtcacatcgccccactgaccacgaccttccccgacattggagtccttggcgtctcccaggtcgaaacagtcccaagtgatagcacctaatgctcgacttgtttcggcctgggccgccgaggattcccagaacgaccattcttctaaataatatttatatttcagaataaaactatatatatatcgttggcgggacttgtcccgcctcgataccgagtgctgcagagcggcaaaataaagaagaaaccgacgtcgctctgcagccaaggaccacccaaactcaagccagcaccgtcgacaaccaacatcctcaagtcggcggttgctggaacaactcataacatcttcaanataaattatcaccctgtgcagcaggaggccgtgcttttaaaactactctgtagtggctcatgataatatttcgctccttttttgccccgtgtaaacttagtngatgcgaataaaatcagttgaatca

SEQ ID NO: 1373 - DNA, 128 bp, Bombyx mori
  source 1..128: mol_type = unassigned DNA
taaaaactagcataattattaactcataactaatgtatattacttggccaaaagcccgtatatacagttccaccggctctgtcgacagactgaactgagaaaggggaaacatatggaaataataataa

SEQ ID NO: 1374 - DNA, 204 bp, Anopheles gambiae
  source 1..204: mol_type = unassigned DNA
taacatccggtgcaaactcattaacattaagaaaagagagaggagaaatgagaatgagattcattcacctttggcatttgaatagcccggggtaggtgaaaagttcccagcatattgctgagaagtgacaaaattcggataataataataataataataataataataataataataataataataataatatgcataataata

SEQ ID NO: 1375 - DNA, 474 bp, Bursaphelenchus xylophilus
  source 1..474: mol_type = unassigned DNA
taagaaaagcatgaaataataagaaatcagataagaataacaagaatactaataagtatatcatgtaactatgacaaaaagaacgcaccaataagaacatgcttgagtggccagctctgcaggcaaaagtcgaatttggaacagccggtaatggaagacctgcaacaaacgtggggtagcaggcaatatgtaactatgacagaccaaaactccgaaactctggtaatgagcccgtgccccccaagcatgtggtctcgttcgatgtagttaggaacagttctctttaacccgtgatgattacgccctgtcttaaatggcaggtgccaccaaataccgaacactcgttgaggtatggtggtccgaatgtgaagctgggagtacaatttggtacgagagcaccagcgcccccgatctaagtgatgacgcatgcgtcggaacaatgaagacggctggcaaacattcaggagtcgcaaa

SEQ ID NO: 1376 - DNA, 31 bp, Heterodera glycines
  source 1..31: mol_type = unassigned DNA
  misc_difference 11: note = a, c, t, g, unknown or other
tgaggactcanaattgacaatacacctcaga

SEQ ID NO: 1377 - DNA, 106 bp, Parhyale hawaiensis
  source 1..106: mol_type = unassigned DNA
tgagccttaggtcgcgggatgtgacccggcgccagagtgtagagctgaacatcgctcaaccgatccaatttgggtcgtgaaatcccctcgataataataataataa

SEQ ID NO: 1378 - DNA, 651 bp, Bursaphelenchus xylophilus
  source 1..651: mol_type = unassigned DNA
taacaagtgtaataaaaaccacccatgcgtagtaaaccgatcaattatctagcaaaatcgcaggtcagaagaccaaagaaccgacccagaggaataggaccagagctgaaactctcagatacgccaacggtcctaataaaacgtcgttaagtaaagcatcgttaagtacaaaacaaaagcactgtaaacgcgaggccccctctttgccaaactccggtaatcctcgtagtacggtgctttttcccgcttcacgaatcagaacgctgccagatcttgtccgacatgggccgtagggtttgggagtaccagcgtggggcggagagcgtacctgggtacactgcataatcgggtctcagaaaaccacctatggtttattattctgtctcccatctgcagggtagcttttcgttgggccataggagcctaggggcaagagtgcatgtagtcttcaacggccatgccagggaaacttgtgagaggtgagggataactagcatcagataatatcagtcatgaaattagtaacaaccaacgttcaccgtcgttggcaaaacaccgactaacgatgctagttagaaagagtcgggtcttcccaaagttaggtgcttgcaccgaagccgatccgctctacccacagctctgcccagcgtt

SEQ ID NO: 1379 - DNA, 406 bp, Heterodera glycines
  source 1..406: mol_type = unassigned DNA
tagtcgtagcccagatgtcgacagcccctacaccggtagatggaaggaggtatgtatctaagcccacggcaagccaccagtggaaacggtgaccacctctgttcgcggaaatgccccgtagagtatatgaaggtcggagcattgaagcacaagtgagaaccctggaagtatggtggtgagctggtaacctcgaattcctcctatgggtgcttgcgcccgtaggtcatttgtgtatgtagggatggaaggaatctcgatagcgcaaatcgggataccgcactggcgatcatgctgccagtgggccctgctgagttgggcgggttagcaacccgtccagggacgcagatgccaaaagcctggtgacactctaaagggagtctacggcgacgagaacatcccctaagtc

SEQ ID NO: 1380 - DNA, 99 bp, Strongyloides ratti
  source 1..99: mol_type = unassigned DNA
taattagatttatatgtgccactttacctcaaagatatattaatactaacttaattataatttattatgaattataatataataagttttaaaataaaa

SEQ ID NO: 1381 - DNA, 587 bp, Bursaphelenchus xylophilus
  source 1..587: mol_type = unassigned DNA
tgagaccacccatgcgcagagtatccgaatcagtgaaagtccaagtttcaggacagaaacgtcagataagtccaagagaaacgagaaaacaagttcaagtatgcaagagttaatcaataagagagtaccgtaaatgtatgacccccccctttgccaagtcgacaactgtcatgcaggtgtctctcttttcacccgccatatggaccaaacgctatccagcctcgctcagaagagccttagggctggggagtaccacatgtggcggaaactgaatctggatgcgatgcataccgggagcgcagcgaaatcacttaacgctggtgcacctcctgctatcgtagtacttcctagatagatgagtagggtgggctaaaggtagtcgtcttcaatggcaataccgaggggtctcgtgacaggtgagggataactagtatcagataatatcagtcatgaaattagcaacaaccaacgtcaccgtcgttggcaaaacaccgactaacgatgctagttagaaagagtcgggtcttcccaaagttaggtgcttgcaccgaagccgatccgctctacccacagctctgcccagcgtt

SEQ ID NO: 1382 - DNA, 364 bp, Bursaphelenchus xylophilus
  source 1..364: mol_type = unassigned DNA
taattaggcagtgctcctagcggagtgccgtgaagtggtgtcagtacccgtcgtgtggaaagcccaggagggttagtaccgacagtgggaaacccgctgcacgcaacctaaagacatttgcccttcgggggagaggtatgagaccacactagtcatggttgcttgcgcaagcatgactcattcattgtaagttcgtattatgaggcctcgcggaatgcgaaagtccaagagcgccaacttgtctctttgggaggttcctccgggttccttagggttggcgtaccatgcttcgtgtgagacctaggccgcttggacctagagttaagctgttgcatgtttgaggatgccttaggcggacgccatg

SEQ ID NO: 1383 - DNA, 177 bp, Ascaris lumbricoides
  source 1..177: mol_type = unassigned DNA
tagtcgctaaggggtccggaaatggtccggtcctgcgctacccggttctggtagcacgttcaagcgctcaatcgcctgccttgtaggcagtccatctgtggaagtcgcgctcttgatacagatgtggacggatggaagcagatgatagagccggtgacggccctactagccaaacgc

SEQ ID NO: 1384 - DNA, 160 bp, Heliconius melpomene
  source 1..160: mol_type = unassigned DNA
taacttattgtcagaattccttactagtaataataattatcgctgaaaatctccacccaaatattgcttggctatatgctcgcaatttttggttaacgtaccccaatgatttgggagaacaaaaatggtaaaactataataataataattatattaatat

SEQ ID NO: 1385 - DNA, 84 bp, Takifugu rubripes
  source 1..84: mol_type = unassigned DNA
tagaggacccgagtctgaaggaaggaggcaccgcccaggagggcgaggaagagatttttttttatatatatatatatatatata

SEQ ID NO: 1386 - protein, 1365 aa, synthetic construct
  source 1..1365: note = Description of Artificial Sequence: Synthetic polypeptide
VGLCPSPGVDGTHQPNDSFQNFGETNFSVQVARLVTRNLAPRSVRGNGFGSGMATHPVPADESGHESDPFLVGRSCGQPARLTRQSVGTQTSRDDILPSKTTKLTENELDLLVNFSLELYRSDLQGFVQEGIHFSVNREVLEGFPEVYEQPAPQPAVGDDLNTSLPPDNNICVLEKGSSEAVEDGTPEVAHPVPETQGKESPNNIVMVTLPNKNPPCPCCRVRLHSVLALIEHLKGSHGKKRACFRCVKCGRENFNYHSTVCHIAKCKGPKVEKAPVGEWICEVCGRDFTTKIGLGQHKRLAHPLVRNQERIDASQPKETSNRGAHKRCWTKEEEEMLIKLEVQFEGHRNINKLIAEHLTTKTSKQISDKRRLLPRKQLTDLSKGVAGQKVLDPGLSHQPQLGVVDNGLGGGHLPGGPAAEGRTIEPLGHHLDKDNGHREIADQHKAGRLQAHYRKKIRKRLSEGMISNFPEVFEQLLDCQEAQPLINQAAQDCFGCLDSASQIRKALRKQNTQKDQGDQPKRPAQKWMKKRAVKRGHFLRFQKLFHLDRGKLAKIILDDVECLSCDIPPSEIYSVFKARWETPGQFAGLGDFEINRKANNKAFRDLITAKEILKNVREMTKGSAPGPDGIALGDIRKMDPEYTRTAELFNLWLTSGEIPDMVRGCRTVLIPKSSKPERLKDINNWRPITIGSILLRLFSRIITARLTKACPLNPRQRSFISAAGCSENLKLLQTIIRTAKNEHRPLGVVFVDIAKAFDTVSHQHIIHVLQRRRVDPHIIGLVKNMYKDISTVITTKKNTYTDKIQIQVGVKQGDPLSPLLFNLAMDPLLCKLEEHGKGFHRGQSKITAMAFADDLVLLSDSWEDMNANIKILETFCDLTGLKTQGQKCHGFYIKPTKDSYTVNNCAAWTINGTPLNMINPGESEKYLGLQFDPWVGIAKTSLPEKLDFWLERIDRAPLKPFQKLDILKTYTIPRLTYVADHSEMKAGALEALDRTIRSAVKDWLHLPSSTCDAILYTSMKDGGLGVTKLVGLIPSVQARRLHRIAQSPEETMKDFLEKAQMEKMYEKLWVQAGGKRKRMPSIWEALPEVVPSIDTATTSEWEAPNPKSKYPRPCNWRRKEFKKWTKLIAQGWGIRCFKGDKISNNWIRHYRYIPHRKLLTAIQLRASVYPTREFLARGREDNCVKSCRHCEAAEESCAHIIGMCPVVRDARIKRHNRICERLMEEAGKRDWTVFQEPHIRDVTKELYKPDLIFVKEGLALVVDVTIRFESTKTTLEEAAAEKVNKYKHLETEVRNLTNAKDVIFMGFPLGARGQWYNKNFELLDTLGLPRSRQDIIAKTLSTDALISSVDIIHMFASRGRRQHA

SEQ ID NO: 1387 - protein, 1343 aa, synthetic construct
  source 1..1343: note = Description of Artificial Sequence: Synthetic polypeptide
NKFLGKSRVAYCLKPGPPVSDRGKEFGSGLTTHPEPESESGHDPTVPNPGPSLGAGEGAQPLPLLRVSVGTQTCEEDFITSRPTKLPGIESELGPLVKFSLEVYRSDLKGDVQFEGIHFPDNWGVLEGFPEVYEQLAPQPNGGDELNHSLPGDREGDVLEKDSSEKEKEAAPEALPSVQRARSEQLPDNIVKVTVPDKNPPCPCCGVRLNSVLALIEHLKGSHGRRRVCFRCAKCGRENFNHHSTVCHYAKCKGPQIERPPVGEWICEVCGRDFTTKIGLGQHKRHMHAMVRNQERIDASQPKETSNRGAHKRCWTKEEEELLMKLEVQFENHKNINKLIAEQLTTKTAKQISDKRRMLLKKGRGTTGNLETEPGMSHQSQAKVKDNGLGGDHLPGGPVVDKGTIGKPGQHLDTDNSHQITAGKKKGGGLQARYRRRIMKRLAAGTINIFPKVFKELINDQEARPLINQTTEDCFGLLDSACQIRTALREKGKSQEERPRKQYQKWMKKRAIKRGDYLRFQRLFHLDRGKLARIILDNTESLSCDISPSEIYSVFKARWETPGHFNGLGDFEIKGKANNKAFRDFITAKEIEKNVREMSKGSAPGPDGIALGDIKKMDPGYSRTAELFNLWLTAGDIPDMVRGCRTVLIPKSTTPERLKDINNWRPITIGSILLRLFSRIITARMTKACPLNPRQRGFISAPGCSENLKLLQSIIRTAKNEHKPLGVIFVDIAKAFDTVSHQHIIHVLQQRRVDPHIVGLVNNMYKDISTYVTTKKNTHTDKIQIRVGVKQGDPLSPLLFNLAMDPLLCKLEESGKGFHRGQSSITAMAFADDLVLLSDSWENMKENIKILETFCNLTGLKTQGQKCHGFYIKPTKDSYTINNCPAWTINGTPLNMINPGESEKYLGLQIDPWTGVAKYDLSTKLKIWLESIDRAPLKPLQKLDILKTYTIPRLTYLADHSEMKAGALEALDQQIRTAVKDWLHLPSCTCDAILYVSTRDGGLGVTKLAGLIPSVQARRLHRIAQSPDETMKDFLEKAQMEKMYEKLWVQAGGKKKGMPSIWEALPMTVPPTNTGNLSEWEAPNPKSKYPKPCDWRRKELKKWTKLESQGRGVKNFRNDTISNDWIQYYRRIPHRKLLTAIQLRANVYPTREFLARGRGDNYVKFCRHCEADLETCGHIIGFCPVTKDARIKRHNRICDRLCEEAAKREWVVFKEPHLRDATTELFKPDVIFVKEDRALVVDVTVRYESAKTTLEAAAMEKVDKYKHLEAEVKELTNAKDVVFMGFPLGARGKFYKGNFNLLETLGLPKTRQLSVAKTLSTYALMSSVDIVHMFASRSRKPNV

SEQ ID NO: 1388 - protein, 1193 aa, synthetic construct
  source 1..1193: note = Description of Artificial Sequence: Synthetic polypeptide
MESTAKGKSYWMARRPVEGATEGSLGRVPFVTRDPKRKPEAKRTLTHGLGLRECSVVLTRLIEGRRGRDHTPSGWNAQRGMPNDESSVEEPNGPIPSNPIPTGTQALPEPMADGEQGEHPGVVVTLPLRDLNCPLCGGSASTAVKVQRHLAFRHGTVPVRFSCESCGKTSPGCHSVLCHIPKCRGPTGEPPEKVVKCEGCSRTFGTRRACSIHEMHVHSEIRNRKRIAQDRQEKGTSTDGEGRAGVERADAGEGPSGEGIPPKRPRRARTPREPSEPPANPPILSPQPDLPPGGLRDLLREVASGWVRAARDGGTVIDSVLAAWLDGNDRLPELVDAATQRTLQGLPAGRLARRPATFVAPNRRRGRWGRRLKLLAKRRAYHDCQIRFRKDPARLAANILDGKSETSCPINEQAIHEHFRNKWANPSPFGGLGRFGTENRANNAHLLGPISKSEVQTSLRNASNASTPGPDGVGKRDISNWDPECETLTQLFNMWWFTGVIPSRLKKSRTVLLPKSSDPGAEMEIGNWRPITIGSMVLRLFTRVINTRLTEACPLHPRQRGFRRSPGCSENLEVLECLLRHSKEKRSQLAVVFVDFAQAFDTVSHEHMLSVLEQMNVDPHMVNLIREIYTNSCTSVELGRKEGPDIPVRVGVKQGDPLSPLLFNLALDPLIQSLERTGKGCEAEGHKVTALAFADDLALVAGSWEGMAHNLALVDEFCLTTGLTVQPKKCHSFMVRPCRGAFTVNDCPPWVLGGKALQLTNIENSIKYLGVKVNPWAGIEKPDLTVALDRWCKRIGKSLLKPSQKVYILNQFAIPRLFYLADHGGAGDVMLQNLDGTIRKAVKKWLHLPPSTCNGLLYARNCNGGLGICKLTRHIPSMQARRMFRLANSSDPLMKAMMRGSRVEQKFKKAWMRAGGEESALPRVFGANQYQEGEEVANDLVPRCPMPSDWRLEEFQHWMGLPIQGVGIAGFFRNRVANGWLRKPAGFKERHYIAALQLRACVYPTLEFQQRGRSKAGAACRRCSSRLESSSHILGKCPAVQGARIRRHNKICDLLKAEAETRGWEVRREWAFRTPAGELRRLDLVLILGDEALVIDVTVRYEFAPDTLQNAGKDKVSYYGPHKEAIARELGVRRVDIHGFPLGARGLWLASNSKVLELMGLSRERVKVFSRLLSRRVLLYSIDIMRTFYATLQ

SEQ ID NO: 1389 - protein, 1454 aa, synthetic construct
  source 1..1454: note = Description of Artificial Sequence: Synthetic polypeptide
MLRGGVGTPPAGGAGAVGPGMASPGGCSVRFSPGGRRLLGHRTGGLSPSVSWRLKRLSVSLRRWSGPGLLGADGAGGGAAVASPRGTQVLGSGAGRRWLGHGSRGSSPSAARGLRRLTVRLKRLSGGLLSPKACRDAEEGSSSSPGFRNPKGLGGRGLTPLGSRRFCRLTVSLNRWRGSLVKLNASSRASGRRTPVKPACDSRAGRGSEHAEGGGVSAAPMVLRSRRKLTFSVDGDSNSGDRARSGSVSAARPGHLLVDGESASSRSGPAGDARLAGPSTRSRRKGCLPPVDFENPKKRTRLMAKMTNGNPTSHVPCPAPCSNGHEGGGRVAVIEGRLPELSGSRISGIQPALPVETSFVGQSTGRGADGDANANSSPPSPNLGGSVGMVPAVRDGTPPLGRPGEDHSRECAGGNTPLWMLEDSFRCDYCPREFGTRAGRSLHMRRAHLAEYDGAGFCWGERLSEFAATRLWSTEETKKLAVFCERGVPSPSECRAIAASLGAGKTHHQVRSKCRLVFEAIRRRELLEVAAATERLEKSARRKQPAVPPAPVHGVRGVLRGLLGKRVPREGGTTGSTSARIVRRDDCRQGAVASASLNLIRRLGRKATGRSGRRRVLGRPPRMDVRRSVRMRRMRRFLYRLARLGWAKLAMFVLDGQMGASCPVPLVEVSAVFRERWSIVRAFLGLGQFGGFGTADNAGFGKLIDPAEVRAHLQSIKNRSSPGPDGITKVALSKWDPEGIKLAHMYSTWLVSAGIPKVFKKCRTTLIPKTGDVSLHGDVGQWRPITIASLVLRLYSRILTERMTVACPSHPRQRGFIASPGCSENLMLLEGCMSLSKAGNGSLAVVFVDFAKAFDTVSHEHLLSVLVQKGLDQHMVELIKDSYENSVTKVHCQEGCSTDIAMKVGVKQGDSMSPLLFNLALDPLIQQLEREGRGFPVNGKSITAMAFADDLAIVSDSWEGMRANLDILVDFCELTGMRTQPSKCHGFLIEKSGSRSYKVNRCEPWLLNDTALHMVGPKESIKYLGVQVNPWTGIFAEDTVAKLRQWVVAISKTPLRPLDKVSLLCQFAVPRVIFVADHCMLSAKALTEMDRSIRQAVKRWLHLARCTTNGLLYSRKSSGGLGIPKLSMIVPAMQARRLLGLSRSKDETVRWMFLETTDHVAFERAWLRAGGSPDEVPELGPDLVEGSPAEGNADPVSTVRPRKRIVPCDWRQVEFDRWAGQLVQGKGIRTFEADKISNCWLYDYPPNKLKPGDFTAAVQLRANVYPTRELAGRGRTDTIDVCCRHCGEAPETCWHILALCPKVKRCRIQRHHKVCQVLVAEAERHGWEVEREKRWMLPSGECVAPDLICWLDELALIVDVTVRYEFDEESLERARIEKECKYRPLIPVIRASRVQTKKVTVYGFPLGARGKWPAKNELLLADLGLSKARTRSFAKLLSRRVLLHSLDVMRTFMR

SEQ ID NO: 1390 - protein, 1114 aa, synthetic construct
  source 1..1114: note = Description of Artificial Sequence: Synthetic polypeptide
MMASTALSLMGRCNPDGCTRGKHVTAAPMDGPRGPSSLAGTFGWGLAIPAGEPCGRVCSPATVGFFPVAKKSNKENRPEASGLPLESERTGDNPTVRGSAGADPVGQDAPGWTCQFCERTFSTNRGLGVHKRRAHPVETNTDAAPMMVKRRWHGEEIDLLARTEARLLAERGQCSGGDLFGALPGFGRTLEAIKGQRRREPYRALVQAHLARFGSQPGPSSGGCSAEPDFRRASGAEEAVEERCAEDAAAYDPSAVGQMSPDAARVLSELLEGAGRRRACRAMRPKTAGRRNDLHDDRTASAHKTSRQKRRAEYARVQELYKKCRSRAAAEVIDGACGGVGHSLEEMETYWRPILERVSDAPGPTPEALHALGRAEWHGGNRDYTQLWKPISVEEIKASRFDWRTSPGPDGIRSGQWRAVPVHLKAEMFNAWMARGEIPEILRQCRTVFVPKVERPGGPGEYRPILIASIPLRHFHSILARRLLACCPPDARQRGFICADGTLENSAVLDAVLGDSRKKLRECHVAVLDFAKAFDTVSHEALVELLRLRGMPEQFCGYIAHLYDTASTTLAVNNEMSSPVKVGRGVRQGDPLSPILFNVVMDLILASLPERVGYRLEMELVSALAYADDLVLLAGSKVGMQESISAVDCVGKQMGLRLNCRKSAVLSMIPDGHRKKHHYLTERTFNIGGKPLRQVSCVERWRYLGVDFEASGCVTLEHSISSALNNISRAPLKPQQRLEILRAHLIPRFQHGFVLGNISDDRLRMLDVQIRKAVGQWLRLPADVPKAYYHAAVQDGGLAIPSVRATIPDLIVRRFGGLDSSPWSVARAAAKSDKIRKKLRWAWKQLRRFSRVDSTTQRPSVRLFWREHLHASVDGRELRESTRTPTSTKWIRERCAQITGRDFVQFVHTHINALPSRIRGSRGRRGGGESSLTCRAGCKVRETTAHILQQCHRTHGGRILRHNKIVSFVAKAMEENKWTVELEPRLRTSVGLRKPDIIASRDGVGVIVDVQVVSGQRSLDELHREKRNKYGNHGELVELVAGRLGLPKAECVRATSCTISWRGVWSLTSYKELRSIIGLREPTLQIVPILALRGSHMNWTRFNQMTSVMGGGVG

SEQ ID NO: 1391 - protein, 1160 aa, synthetic construct
  source 1..1160: note = Description of Artificial Sequence: Synthetic polypeptide
MNLLIVTSSIKESDVPSSGKGGVAVNNITAGASGKDTCVIIHPGTDGIWCCTECVEIHNSGKDLKRHLAKRHPSVTISGYKCNLCPFVSERQLSVGTHLRYCRGVKEVVKREFACASCSFSSDTFSGLQVHMQRKHIAEWNDQLKEKTEFAWTDRELRELAEKELTTPSFRYNKIFYAALGTSRTYDAVRKIRYNDRYKSAIAEMRSQIADAAAAAQERDVERGLVSAHSDRGKEMLPVVETKSDIQVNNDIKKDIELTPNSRQKQTNLALARPAVIEVEEDLGRQDVKQYLASLRQDDYTSPAERSIFAYCREETNWSATKRQVLKISRTTRGLRQPKKVRPFEFPEGFKPNRNMRKWRKYRFLQECYREKRAETVSKILDGTFIDEPEEEIRPELEEVQRMYIDRLEKRTQLDTTKIVQTDEVFCLQSYGRITIGEVRDALGASKKDSASGPDGLLLQDVRRLGPLLLCNIFNMWYLHGIPVEENRCRTILLYKSGDRHLASNYRPVTIGNMLNRLYAKIWDKRIRKNVRLHVRQKAFIPVDGCFENVKTIQCVLQSYRKRKLEHNVVFIDLAKAFDTVLHDSIRKALWRKGVPSGVVKVVDSLYAGAVTSISVGKTKTRSICINSGVKQGCPLSPLLFNLILDELAERIEATGCGLDLDGHVLSSMAFADDYVLLAKDSVEMNELIRVCSTFFKEKGLSVNPGKCQSLRVLPVKEKKRSMKVLVRPHRWWRIKDQDVDIPSMTYDSLGKYLGVSIDPTGKIALPIEEWKNWMTKLKECKLKPEQKVKILKEVVCSRVNYVLRMSECGISELRSWTRFVRNWAKNIIHLPTWCSSDWIHSIKGLGIPDVSKGIVIQRMRASEKMSTSEDGIVRVVGARLVQKNRVLWEKAGFEGIELKAARRHCEVERLNNIGNITNGVALKTIAAVSSVNRYWMIEDNLKSGNKILVWKAMAGAIPTKINLSRGVADQTLKKCRRCGLTAETDGHILAGCHTSSDAYSKRHNMLCDKLAKELKLNGGPNRRVWRERTCFTSTGRRYRPDIIVKDDSKITVIDMTCPYEKSEGHLIQCESAKVTKYEPLKLDKYWTRELEGANGIVAEKVELMGLAIGAIGTIMRSTLRKLCELKSGRIVRRLQMIACNNSAQIIKGHLSRATRRNLR

SEQ ID NO: 1392 - protein, 1158 aa, synthetic construct
  source 1..1158: note = Description of Artificial Sequence: Synthetic polypeptide
MSNRITIGDVPSVGKGGLTVNKQTAGADGAEACVVIHPGAKGIWSSPACLRKFTIGKELRAHLAQIHKLAPSAVRYRCNKCPYEGDVQLSVGTHLRYCKGIAGVVEEKKQFACAICNFSSDTFSGLQVHKQRKHVVEWNEQLKEKTEFAWTDRELRELAVKEVTIPFSVVNTETFAVLDITTRTKDAVRKIRYTDRYKSILAEVRAQVNAVAEEAPQASDESQITLLVNTGRGAELQPAVINITDSIELVTDVNEVEMVTSNSTNEEQPINAPVEPAVIEADLGRQDAKLYLASLRQSDCTNASDRWTLAYCRGEVDWCKTKSRLFKVSRHARGLRQPQRVENWEFPEGFRPNRNLRKWRKYSFLQSCYRTKKKETVSKILDGTFKDTPEEEIRPELEEVQRVYVDRLEVRTQLDTTRTVHIDERFDLVSYGRITIREVQDAISASKKDASGGPDGLLLQDVKKASPRQLCIIFNMWYLHGIPVVENRCRTILLHKGGEKHLTSNYRPVTIGNMLNRVYAKIWDRRIRKNLQLHVRQKAFVPLDGCFENVKTIQCILQSYRRSRREHNVVFVDLAKAFDTILHDSIEKALLRKGIPRSVIKVVDSLYAGAVTSITVGKTKTRPICINSGVKQGCPLSPLLFNLVIDELAERLEATGCGLDLEGHVISSMAFADDYVLLAKDSVEMNVLMNVCNTFFEEKGLAVNPAKCQSLRVLPVKGKRSMKVLTRTHRWWKINNQDVEIPSMTYESVGKYLGVMIDPAGKIALPIEEWKLWLTRLRECKLKPDQKVKVLKEVVCARANYVLRMSGCGICELRKWSRFVRGWVKSIIHFPAWCNSEWMHSSKGLGIPDVVSGIVIQRMRAAEKMAKSTDGVVRVVGARIVQTNRVLWKRAGLAGIELDAARKFCEVKRVNKIGNQTNGGALKTIAESSVSRHWLLEKNIRPGNKILVWKAMAGVIPTKINLSRGVADQTLKKCRCCGLTAETDCHILAGCPTSRDAYSKRHNLLCDKLAKELRLNGGPSRRVWRERMCLSGNGRRYKPDIVVKDDGVITVIDMACPYEKSERHLSQCEDAKVAKYEPLRLDRSWTQELEGNNGRSANEISVVGIAVGAIGTITRKTQRILSKLKLAKVGRPLQIIACNESAQIIRRHLSGSRLRNLR

SEQ ID NO: 1393 - protein, 1102 aa, synthetic construct
  source 1..1102: note = Description of Artificial Sequence: Synthetic polypeptide
MNLPIREHAVSVHNINKFNYLCQLCSKSYDTINSVKAHYVACRRQKNASSTTAVPTNVINNNQLAINTNQVISRNPLQCVECLMKQVDFYAKDTKALVTHMRTKHAAAYEESKKVATRRVAWSPDEDQILAELEVKLKKIQKGQLLSRLVVEYNKCADKSKAPSRSKDAIRTRRQQHDYKLLLRSLQSQQPPVGSEDSDSDISSSNNNPLTTTHNVTPTPDSSNVVLLIQKIRESVDSIVKITNLKLNTNMLNAASAFINQNNNMDPLELSMRGIEEDVKAIRDKELQKPTRNVPSSTTSRKPTRNAKRLEKSKKYGYYQHLYYNNKKKLVAEILDGETSGAKPPPMNLVEDYYRNIWSRSTIDDSPVNNIKTVNSDSIFAPISRDEIKLALSNTKKDSAAGPDAVTIKEAKAIIDNLYVAYNIWLGVQGIPEQLKLNKTILIPKGNSDLSLLKNWRPITISSIILRVYNRLLAYRMNKIFKTNDKQVGFKPVNGCGINISWLHSLLKHARLNKNSIYACLVDVSKAFDSVSHQSIVRALTMNGAPSLLVKLIMDQYTNVNTVITCSGSISNKINISSGVKQGDPLSSLLFNLVIDELFDVIKDQYGYTIDNIGTTNARCFADDLTLISSSRMGMNKLLELTTKFFKERGLNVNPSKCMSIGMSKGYKGKKSKIESEPLFSITDAQIPMLGYIDKTTRYLGVNFTSIGAIDAKRIKKDLQDTLDKLEHLKLKAQCKMDLLRTYMIPRFMFQLIHTELYPKLLIKMDILIRKLAKRILHLPISTSSEFFYLPFKEGGLQLTSLKEAVGLAKIKLHKKIMSSNDPMLCYLIESQRSRIVEHFMKDLKLGDSLTLNEMNNIKECFMKEKRISFAQKIHGVGFEVFSSSPLTNQWINGEIKTMTTKTYINSIKLRTNTLETRVTTSRGLNIIKTCRRCHVADESLMHVLQCCSSTKGLRYSRHHKICAKVANKLVMNGYGVFREKSYPDPNNSGSYLRPDIIAVKNGHVIVLDVTVVYEVTGATFINAYQTKINKYNAIMVQIEQMFNCVNGELHGLVIGSRGSIHHSQLHIWHQMGFSSIELKYVAIGCMEDSLRIMSTFSKAIT

SEQ ID NO: 1394 - protein, 1276 aa, synthetic construct
  source 1..1276: note = Description of Artificial Sequence: Synthetic polypeptide
MGTDTVYVGQDYPSGLSKRVPARLVAGPMLRERSCHAHVFRAGHMWNWRTSLPSGRWDQPALEKSRVLTRSVATATDPEITSYPGKSVSTSTQVQEEDWCSRESGWISPGLAPEEPSVVSEITASMVATMRVATEEVVLEPQPEQVVTILPEHGRNVPPGLAEQDTASPIEVSVLLPDLAENCPLCGVPSGGLRLLGKHFAVRHAGVPVTYECRKCAWRSPNSHSISCHVPKCRGRARMPSGDPGIACDLCEARFATEVGVAQHKRHVHPVEWNKVRLERRGARGGGIKATKLWSVAEVETLIRLIREHGDSGATYQLIADELGRGKTAEQVRSKKRLLRIDTASNSPDDAEVEEERLESLAVRSSSRSPPSLVATRVREAVARGESEGGEEIRAIAALIRDVDQNPCLIETSASDIISKLGRRVDGPKRPRPVVREQTQEKGWVRRLARRKREYREAQYLYSRDQARLAAQILDGAASQECALPVDQVYGAFREKWETVGQFHGLGEFRTGARADNWEFYSPILAAEVKENLMRMANGTAPGPDRISKKALLDWDPRGEQLARLYTTWLIGGVIPRVFKECRTKLLPKSSDPVELQDIGGWRPVTIGSMVTRLFSRILTMRLTRACPINPRQRGFLASSSGCAENLLIFDEIVRRSRRDGGPLAVVFVDFARAFDSISHEHILCVLEEGGLDRHVIGLIRNSYVDCVTRVGCVEGMTPPIQMKVGVKQGDPMSPLLFNLAMDPLIHKLETAGTGLKWGDLSIATLAFADDLVLVSDSEEGMGRSLGILEKFCQLTGLRVQPRKCHGFFMDKGVVNGCGTWEICGSPIHMIPPGESVRYLGVQVGPGRGVMEPDLIPTVHTWIERISEAPLKPSQRMRVLNSFALPRIIYQADLGKVTVTKLAQIDGIVRKAVKKWLHLSPSTCNGLLYSRNRDGGLGLLKLERLIPSVRTKRIYRMSRSPDIWTRRMTSHSVSKSDWEMLWVQAGGERGSAPVMGAVEAAPTDVERSPDYPDWRREENLAWSALRVQGVGADQFRGDRTSSSWIAEPASVGFAQRHWLAALALRAGVYPTREFLARGKEKSGAACRRCPARLESCSHILGQCPFVQANRIARHNKVCVLLATEAERFGWTVIREFRLEDAAGGLKIPDLVCKKADTVLIVDVTVRYEMDGETLKRAASEKVKHYLPVGQQITDKVGGRCFKVMGFPVGARGKWPASNNTVLAELGVPAGRMRTFARLVSRRTLLYSLDILRDFMREPAGRGTRVALIPAATGAAN

SEQ ID NO: 1395 - protein, 1168 aa, synthetic construct
  source 1..1168: note = Description of Artificial Sequence: Synthetic polypeptide
GIDGYMFGYARASGSTSVSIQSSSMTEGETNERATPRASDSSSVSIQSSCVTEGECLPPTDNCNPSVENQLPCVTEGRFERVGSLVTVRLPFRKVACDLCSKEFLTYSKFAVHQANFHNSETQACCTYCGKSDGNHHSIACHVPKCPWRRTVTFAANLSNFLCDLCNDSFKTKSGLSQHKRHKHPCSRNAERILSLGVRTPSARPRQVVWSEEETRTLREVEVVYSGQKNINVLCAGHLPGKTSKQVSDKRRDLHRIRSSNVHGTPTTQSRGDPVEQVEEYEELDWEGMHPFPDPDSKFCSYLDQLRDQKGLTEPVWQEIEIVAQEWVENLAHVQSSWNHERTTKQVPENNTPARRPFKRRLHRVERYKRFQRMYDLQRKRLAEEILDGREAVTCNLKKEEIKDHYDQVYGVSNDRVSLDDCPRPPGANNTDLLKPFTPTEVMDSLQGMKNGAPGPDKITLPFLQKRLKNGIHVSLANVFNLWQFSGRIPECMKSNRSVLIPKGKSNLRDVRNWRPITISSIVLRLYTRILARRLERAVQINPRQRGFVPQAGCRDNIFLLQSAMRRAKRKGTLALGLLDLSKAFDTVGHKHLLTSLERFAVHPHFVRIVEDMYSGCSTSFRVGSQSTRPIVLMRGVKQGDPMSPILFNIALDPLLRQLEEESRGFMFREGQAPVSSLAYADDMALLAKDHASLQSMLGTVDKFCSGNGLGLNIAKSAGLLIRGANKTFTVNDCPSWLVNGETLPMIGPEQTYRYLGASICPWTGINSGPVKPTLEKWIANITESPLKPHQRVDILCKYALPRLFYQLELGTLNFKELKELDSMVKQAVKRWCHLPACTADGLLYSRHRDGGLAVVKLESLVPCLKIKTNLRLVHSTDPVISSLAESDGLVGAIEGIAQKAGLPIPTPDQRSGTYHSNWRDMERRSWERLALHGQGVELFKGSRSANHWLPRPVGMKPHHWVKCLAMRANVYPTKRGLSRGNLSKNKDSAKCRGCTSMRETLCHLSGQCPKLKSMRIRRHNKICEHLIAEASFKGWKVLQEPTLVTDNGERRRPDLIFHRDDKAVVVDVTVRYEISKDTLREAYASKVRRYGCLTEQIKDLTGATSVVFHGFPMGARGAWFPESSDVMADLNIRSKYFEEFLCRRTILYTLDLLWKSNNEQYLERLAP

SEQ ID NO: 1396 - protein, 1687 aa, synthetic construct
  source 1..1687: note = Description of Artificial Sequence: Synthetic polypeptide
MLRRKGRHRMVMVNSVKWQPSAHAEAIGTGKSWAPQRSQASEHGWQSNAMFDPPNRILFARDSWSLNQSTHLQNQRSGSGLGIRPGQVRNNMVGGGPHRAGDPKRRVELVSIQGSEVTVRTIYPSDEIFSCYSKSCDIKTKAGYGPEDLKHLTRHIKNEHGLKARWAYQCGLCNEKSDPSVSEGHKWMEAHMVAVHQSSAEKRIKSYQKCTGARVAEQLQAAAPSLTVPGKHKSGSRDAAKDSMTPTKDDDPKTRIYQTRSVVKKSTQKTAEPTDEGSRGPKYASIFQKSVKARKSLALLCELSSPKPMNPLPTNELTLKEGNSRELAKEEAPSEGIDDIVIIDLDESEESPPRRKRFNTWCLDHESSREAWLDDTAIFWYISYLCRGSTKYSALDPCLWSMYKVKGSRYILDRLESSITYFFPICEEDHWTLLVLKDNSYYYANSLHQEPRGPVRDFINDSKRARKEFKVQVPLQRDSFNCGVHICLMTNSIMAGGKWHSEEDVRNFRKRLKKTLQEEGYELYSVNSLGIPFQAPTTEQMDYKETRCKRSYASVLTQISPPAKRPDCKPDNNIFVPTKDCAAEGNPQEKGRNESPEEINTEHIVVAGKPANNISPRCRSTSEMLFEMVKATTSSGRSSLGTMTQDEFIRTSTIAEAVPLMSIKLPPMELPRKILPPIPPRKPTQTNGGQKGKQQRVPTGKPDTLNAKVRNWFNNQLESYAMEGRSFQRLEWLTEVLTASIQKAAAGDEGIVDIICKRNPPLEVAKGEMCTQTENKRKTTNNAARIADPIQSSKGAGDVKASYWKERARTYNRIIGSKEELCKIPIDQLEDFFKKSTSRTNVQESIMKEKSSKIPALKIGNWMEKKFIGKEVAFALRKTKDTAQGADGLRYHHLQWFDPSGELLAKVYNECQRHRKIPKHWKEAETILLFKNGDQSKPENWRPISLMPVIYKLYSSLWNRRIRAVPNVLSKCQRGFQEREGCNESLAILRTAIDVAKGKRRNLAVAWLDLTNAFGSIPHELIEYALTAYGFPQMVVDVVKDMYQGASMRVKNATEKSDRIPIMSGVKQGDPISPTLFNICLETVIRRHLESANGHQCLKTRIKVLAFADDMAILTDSPDQLQRELSKLDNDCTPLNLIFKPAKCASLVIQKGVVRSASIKLKGNAIRCLDENTTYKYLGVQTGSAARISAMDLLEKVTKELECVVKSDLTPPQKLDCLKTFTLSKLTYMYGNSIPLITEIKMFANIVIRGVKVMHRIPVRGSPLEYIHLPVKDGGLGVACPKTTCMITFLVSTLKKLWSDDEYIKTLFTSLAEEVVKKESKKSTVTMDDIADYLNVEERINRSEFGYNSITRLRDVMRNLAITGDSPLYRLKMVVKNGKIALLVQATSESMERIYTEEDAKKLQRSLKDQVNKALKHRFNTTKVVKSKVVRVVQQHPASNRFVTKGGNLSLACHRFVHKARLNLLACNYNNYDKSKSKVCRRCGKDLETQWHILQNCPFGFSKKITERHDAVLHKVKTLIESGGKKNWTMKIDEELPGFSRLRPDICLKSPDEKQIILADVACPYEHGVEAMERSWQAKIDKYETGFAHLRKSGTKLTVLPIIIGSLGSWWKPTGDSLKELGIKGSVINSAIPELCATVLEHSKNTYWNHIFGEAYIPNPMRNGHAKPAGNGWKKERLQKAPVRPTN

SEQ ID NO: 1397 - protein, 1059 aa, synthetic construct
  source 1..1059: note = Description of Artificial Sequence: Synthetic polypeptide
MSLQRAKNARGDPGRCNLCSADYRDLKDHLNKQHSTHFFVPSDLRGSSLVACPRCGTPCSAGTGLSRHQSRYCGLTAPRIRRNRVGNSTNTSRCPPSNTAASPIVPSPSPERPSPPQPAEVVASLEPLSEAEEVLEVAQVDAETVDTLEGTRRAPESVPRSAEEGSTRVRELNMTAPEEEHRGEEESSHTNPTAPAGLENAVSSTLGPSPGTLPSLLPSQECANERFLYLAHLPVRSKPLPNNLVTDFMDAAERCALAYIAQPSDSTLLAFLALPKVGLTQALAPEQPLRPSTFLKQFPHIPWPEQPPARRPPSNIRPDTTKQVIKLVENGRLGAAERVLEEDASVAELDQGVIDQLITKHPKGPSCPFGNAVGPTPGKAPDIDTIQKALDSFKPDTAPGVSGWSVPLLKTAAKREPVKQFLQLLCAAIANNTAPGRSMLRTSRLIPLKKDDGSIRPIAVGELIYRLCAKALIISHFQPDFLLPFQLGVKSIGGVEPIVRLTERVLEGSAGAEFSFLASLDASNAFNRVDRAEMAAAVKTHAPTLWRTCKWAYGDSSDLVCGDKILQSSQGVRQGDPFGPLFFSITLRPTLNALSQSLGPSTQALAYLDDIYLFSNDSQVLSKTTQFLADKQHIIKLNEKKCKLISFDEIRQEGFKMLGTMVGGKEKRAEFLEGRIRKEMAKVGKLKDLPHQHALLLLRFCIQQNLRHLQRSLRSDDLVDLWERLDTMLWEEVKRMRMRQREDTAEEEALGRSLTKLPARLGGLGLLSFKDVAPLAYRSAAEASDTLLDNLGLLSSPEEPPTPIPQRTRCAELWESQQEAILHNLGDTERKRLTENASRLGRSWLSVIPYLQPLRLSNVEIASGLHDRTLVGSSIPVCRFCGSDSPLGHDELCRARNPWTQRRHNAINRVIYQHLKQIQGATVEIEPHTLSGQRRNDLRVRGSSALAFTDYDLKVYSLGDRDARSTVTPCAPNGKLADFCLDRCVNWLDKVGQVVSKNAPKVTGGVFKPIILSTGGLMSRSTADEWKDWRDAMPVGGFEKMEKRIGVELVKARARTLVL

SEQ ID NO: 1398 - protein, 1024 aa, synthetic construct
  source 1..1024: note = Description of Artificial Sequence: Synthetic polypeptide
MSQPNISSAETPLSQLPTPVPTPPSPSNPSLSLPTVRDLLLCPIRSSHVYSSIPSSCLHSFTMLLIKTVRAASATMTPTESHRAFIHLHILPIAVLRRSFRGETGWRSRTGQHHALRQRIRRASSGRHWAALWHEALAAHQVDLDYRTRHSRRYQASATSRHRIGRAMRLAADAQYGRAMSALKAKPLPDLHAAATRDTLTALHPPPASPVQPLSPTDLPPVPEITEGQVLRAARALNPTSAAGPDHLSPRILQLLARTTISPEAGVTGLSALTNLVRRLARGDIPDRTAPLLAAATLIPLQPRPHKIRPIAVGQALRRLVTKVLLPPAIQDTRDHLLPEQLANSVASGMDAIVHDTRMLMHRHGRNPDYIMVSVDARNAFNTFSRQSLLDRLPLQTPSLARFLNLIYGRTVPDLVLPSSPRFLMKSQEGTQQGDPASMLLFSLAIQPLLRRLTRECRLDLNRWYADDGTLVGPISEVIKALRILRDDGPQSGFHVNINKCRAYWPTVMPEKLSELLRIFPLHVECGEGGVALLGAPLGTDAFVRRHLMNKVQSCHASLSLLDEIPDARTRFHLHRVTGSVCKVEHVFRLTPPHLSLPAATKFDEQQIAAYSRLNDVAVSTSMATQIGLPFRLGGHGFTPLSPFIHASYAASLIEAAPVRVKGPHNPSESFYRRMARRHIVHVLGALNPEVRTRGILGTHSPLGPFEPEALLSRPERVHHTLIQAMQGATSRLYWEHTAWDLDPLPRNHSAASVRRRARYNSLRAPGAASFLCSHPSLTSRVPSAVWSCMLRRHLDTPVYCDSIRPLICSHCCKPMDARGDHAAICRHGFGVVHRHNTVRNLLARHAFRAAGLCCDLEVPSLLPNTANRPADILVQPAPPPSGALPDRPTAYDVTVRSPYCRSTMSLAAKGLAGAAEAADLDKLRVHSRTVRDAFHLQPDSPLPLLDWHFVPLAFDTLGATSSRTMAVLEYLAHRIANRTYSSYGTAKIRLLQRISFAVWSSLASATLSRMPYHGAALSSPAQV

SEQ ID NO: 1399 - protein, 1353 aa, synthetic construct
  source 1..1353: note = Description of Artificial Sequence: Synthetic polypeptide
  VARIANT 3: note = Any amino acid
  VARIANT 4: note = Any amino acid
  VARIANT 6: note = Any amino acid
  VARIANT 31: note = Any amino acid
  VARIANT 32: note = Any amino acid
  VARIANT 33: note = Any amino acid
  VARIANT 34: note = Any amino acid
  VARIANT 46: note = Any amino acid
  VARIANT 52: note = Any amino acid
  VARIANT 59: note = Any amino acid
  VARIANT 79: note = Any amino acid
  VARIANT 85: note = Any amino acid
  VARIANT 92: note = Any amino acid
  VARIANT 96: note = Any amino acid
  VARIANT 98: note = Any amino acid
  VARIANT 100: note = Any amino acid
  VARIANT 103: note = Any amino acid
  VARIANT 122: note = Any amino acid
  VARIANT 140: note = Any amino acid
  VARIANT 163: note = Any amino acid
  VARIANT 170: note = Any amino acid
  VARIANT 188: note = Any amino acid
  VARIANT 193: note = Any amino acid
  VARIANT 199: note = Any amino acid
  VARIANT 207: note = Any amino acid
  VARIANT 209: note = Any amino acid
  VARIANT 220: note = Any amino acid
  VARIANT 257: note = Any amino acid
  VARIANT 274: note = Any amino acid
  VARIANT 276: note = Any amino acid
  VARIANT 292: note = Any amino acid
  VARIANT 298: note = Any amino acid
  VARIANT 303: note = Any amino acid
  VARIANT 306: note = Any amino acid
  VARIANT 307: note = Any amino acid
  VARIANT 309: note = Any amino acid
  VARIANT 333: note = Any amino acid
  VARIANT 344: note = Any amino acid
  VARIANT 353: note = Any amino acid
  VARIANT 368: note = Any amino acid
  VARIANT 382: note = Any amino acid
  VARIANT 383: note = Any amino acid
  VARIANT 391: note = Any amino acid
  VARIANT 476: note = Any amino acid
  VARIANT 480: note = Any amino acid
  VARIANT 573: note = Any amino acid
  VARIANT 591: note = Any amino acid
  VARIANT 620: note = Any amino acid
  VARIANT 669: note = Any amino acid
  VARIANT 678: note = Any amino acid
  VARIANT 707: note = Any amino acid
  VARIANT 709: note = Any amino acid
  VARIANT 728: note = Any amino acid
  VARIANT 759: note = Any amino acid
  VARIANT 780: note = Any amino acid
  VARIANT 791: note = Any amino acid
  VARIANT 799: note = Any amino acid
  VARIANT 845: note = Any amino acid
  VARIANT 857: note = Any amino acid
  VARIANT 860: note = Any amino acid
  VARIANT 878: note = Any amino acid
  VARIANT 880: note = Any amino acid
  VARIANT 882: note = Any amino acid
  VARIANT 896: note = Any amino acid
  VARIANT 939: note = Any amino acid
  VARIANT 959: note = Any amino acid
  VARIANT 1030: note = Any amino acid
  VARIANT 1038: note = Any amino acid
  VARIANT 1066: note = Any amino acid
  VARIANT 1139: note = Any amino acid
  VARIANT 1153: note = Any amino acid
  VARIANT 1155: note = Any amino acid
  VARIANT 1217: note = Any amino acid
  VARIANT 1253: note = Any amino acid
  VARIANT 1262: note = Any amino acid
  VARIANT 1271: note = Any amino acid
MAXXPXISPPGAPPAPLRYRMLQCPPPLPKXXXXPVPHPMSSPIRXRLPHRXMRGPPSXTPPRDMHRPHGTPGPHSHRXCGRPPXHCTHASXQPRXAXHXLQXPKLRSPPPHPHVSPLILCXGPLPTPMTQPRMKRALSXSAKAPPTKRPSASQGPAASSHDXPRTPPPXPPRPPPYRFPPPTLDQHXFALSXAYPHPXPRRPPSPXRXLRHSFPPRFGXQTFSSIPGPRLHSTVLLLIRLVRAATAANTPETTTLXSCTFTCSRLPFFERPSXAXLAGGPRAVNFMLSACXYGERVXDESGXSYXXKXHCITSHPPRPRRYSRQHSRNHHTXFLHLHLLPTAXLREAFRGEXGWRSSRGQLHALRLXIRRACTGREWGLLXXEALDAHSXRTEWQHTHARRPSPPVSPSARAARAMRLASQAQYGRAMRTFTNPPLADLNDPATMERLQALHPTPTVPVVPLPPSAQPRPPEVTXEAVXRAVRRLNPNSAAGPDRMSPKLLHLLAHTPISPEAGVTGLSALTNLVSRLARGSLPPCTIPLASAATLLPLQPRPGKIRPIAIGQALRRLVTKXLLPAAIDDCRDHLAPEQXANGIPNGIDAIVHDARMLVRRHGNDPHYXMVSIDASNAFNNFSRQQVLDQLPTRAPSLSRYLDMVYARAPSPLVLPSXPPTILHSRXGSQQGDPASMLLFSLALQPLTRLISRECXLXMNRWYADDGTIIGRIDEVXKALDIITKEGPRFQFFLNPSKTRVFWPSRQXDLLSPLMTVGPLRVIDEGGVXLLGAPIGSPSXMAQYIREXLNTCKTALAHLDHIPEARMRFHLHRVSASACRLQHLFRLVPPDFAXPFAQQFDRDQLXAYXRFNSVTMSPRIVPKYGCXFXTXATASPHWHLPYTPXTLLASSIPLQHGYKVPTFPPSLSISVLHEARCGSFFEIYLHSXNPHTSRCDYVAKNRAQIRLXFSHGGHGLTSLASTIHASYAASLIDTAPARLQGPHFPAVSQYQRFARGPLRVVLRNLPSFVQPAHFSMTEXDLGCLEPXALLARPERIHTFLLQAQYSAAASSYWQXPLWESFPNPGDHSAASLRKRVRYNSLLAPGATSFLTAHPAATSRVHNATWSTMLRRHLDAPVTNDSISPLRCXHCSKPMDARGDHAXIXSHGFGTLHRHNTVRNVLARQLFRVAGLAYSLEVPFLIPNTAARPADILVQPPPPAPGLPPDXPTAYDVTICSPFRRGMLYHAARHRGGAADAASVRKXKALERTIRXALLIEDDNXPPPLDWHFQPLSFDALGAPSQSTVHVIEDHAKLMALRNSCTIATAKSRIQQRLSFAIWSSAAAAILSRLPTHAADISYPIEV

SEQ ID NO: 1400 - protein, 1473 aa, synthetic construct
  source 1..1473: note = Description of Artificial Sequence: Synthetic polypeptide
  VARIANT 144: note = Any amino acid
  VARIANT 216: note = Any amino acid
MATTTISRSPSSSSSSSSARSRASASTSASVASIPRLFRDGRFHCPLAHCQTRTSTWQDLSAHLTRMHDGDVPRDVAAACGIVQCLHEGCRKWFRGAAGLASHRGKARHAPPPAPRAALAVAAVPRADSRGRTPAPTPSVAPPXAGPPPRAAPRAAPSPLPCPPALPHPPPSASPPTSSVTSPCSPPTTPPSQPSPDLFSGFANAPTTPSPPSTPXSSPAGSPIPAARRFVLPVATPYPAPAPRANRPKLSPVARPFVPKARAGAIPEASSPVTPQDRAVSRREDAAAAPSSAPGLGLADEHEDDDTYGGDTIALTAPHAPRETRAPFEFEACFLEEEAPATAGDLPPYARAFLACPSARLQEIPRRLKSAWQAAAKTIAEAALDCHTAGDTQGYNAHLRLFIELPARGLAVPTNCRGAARTKLQRERLLDIAAGRIPAIPDPPCDAPGADDALRGFPVSGTTAGDVSNDDDSGGVHDRPAATASARQAKRLVEQGLSSRALRALERGEPAVASADTLGRLEALHPPNPTDRGLWPGAPKAAIPRVTAKHLAQVAKELPRGSAPGPSGWTFELVQAAIDRQPTGTVAAFLIDMAQRALRGTLHWRGLLTASRLVALKKPDGGVRPIAVGEALYRVIGRLVLKADRVMSSADATQYVGRHQYGVAYPGGVEAPVHAVRELHDSGQLRAVVSLDWRNAFNSLDRVHTALLIADRAPALARLYEWSYREDSVLVLPRAFEKAGLPASLLSQAGVRQGDVLGPLFFAIGAAPVLDEIDAIPYVTPRAYLDDIFVTIPHGVTDAATKAAVAATFATAEREGAAAGLRLNRCKSAVWAADAEALLPPHAAGAREDVESCAPVREGLKILGAPVGSPAFVAKSLDGIIKRAIGTLDLVADAELPLQHKLVLLRQCVAQIPTFWARAVPDAGPALAVWDTALLRRTGALVGLDVRDGSLQADIARLPVRLGGLGLRSMKDTAPRAFVASILFAAALANTRRSELTCSASTARRLRAALPELARTDACNDEAAWRRSIARGVFPDVDKLGTTQLQRVLQGMADSKSAHRTRRQVPFLFAAVFEDAATPGSGAWLAAIPSDPTLVLPDAELAEAVRIKLLTTTANAAGVCPACHKTGIDPSHAYTCVSLSHLRTARHDVVVRRVELACKTEKPVREHVLAIPPVAPTDNNNNGDEDGSPVTTADDNADGHAVATKRRPETRASARAAAAAATAAAAAAIINDNSLLSDDDDDDDHDDNCHGEERGEGERNVTCPGHYTATPFAADDTLDNSDEDNEDNAHEDDDEDGKDDNDDDVYNNCNSSSSDGDEGGDDLDYEYSDQSVTRSVDAATGESPNPERPTTPTRALLRADLWLPATSTAVDVMVAAACRRSRAKAFDRAVSRKAAKYGPAVADGSIAKVVPFVVSPFGVLSRPAKAFLKRAMGDTTAAKQAKARLRLAVAAVRGTARLSYAWGACAALIVGGN

SEQ ID NO: 1401 - protein, 1220 aa, synthetic construct
  source 1..1220: note = Description of Artificial Sequence: Synthetic polypeptide
MAPLPWNAATSSPPSPVPLTNDKKKDSTLPTATSKNLSKNNNNKNNNTNRINNIKNNDNTNDGSNKINLKLPPAAVKITNPYKNKKKNKKKNNAGKSNPKTNQNPNSSPLSDNDDDDTDSSNITINRRLKFGTDDLAPPNPPSNTNTIGTATAATAATATTTATAATATTATNTTTTTTTTNNTTGDNLASNINNNNNNNNSGSNNSNTNNINNTDGNGSNNRPPPRVYTVDPRSDLPGAEISAANKMLDEVYGDHVHDNPGSHLSGLISSSQDQLWQGYFRRLIPHNQSLYDCPKGKLGKDITNEYSNLFEAIMNGKCNMEKLLVFPVVVLQRRHGVTKNADVKRRLLSRLTAWKEGKFKYLVEDTHRDLIAKQSKARGDTTPAHRAKVYSSKLMRGHLQSAVNYITDREGGGILYPYDVDEKSGHTVSRVLQDKHPSMRDPGPTAMPAYESVPELPTLEITADTVEIVAGKLSGGAGLSGVDSIQLKHLLLHHGQASQRLRNVCAKFGRWLANEHPPWASYRAMLANRLIALDKMPGIRPVGIGDTWRRFFAKLVLAVSMSYATDCCGSDQLCAGLRAGVDGAIHGLSAMWREMESEENTGFVLIDADNAFNEVSRINMLWTIRHEWPAGARFAFNCYRHHSLLVVRNPGGKPFTFFSKEGVTQGDPFAMIAYGVALLPLIRKLKELNVLLVQSWYADDASAAGKFDEILRLFQDLLRMGPDFGYFPNASKSILITHPDNVVAAHHFFNETHGLGFKISTGSRFLGGFIGDTTSRDEYVSTKIADWIHGTKELAAVARLKYPHAAYTGITKCLQHKWSFTQRVIPGIDDLFQPLEDELTNNLLPALFGDPPSTMDDKLRLLTALPVKHAGLALPNPVTSSATNYKNSTLMSSHLLLAVQGKINFSLQDHRDTCQSSLSASRELRQTENDSSLTNLLAALPPAAAGQPSTTRAIKRAGETGLWLTTIPNHINGNILGCDEFIDAIRLRYQKVPHNLPAKCDGCGSAFDVGHALQCKSGGLIIRRHDELNLELASLAKMALRESAIRAEPEINPSASIMDSPTTITAIDTNGDRGDLLIKGFWDNGMDAIIDVRITDTDAKSYRTRDPKKVLQSQEKEKKKKYLDQCLLQRRAFTPFVVSVDGLIGYEASNVLKQLSKRLADKWNKPYSVTCGIVRSRISIACARASNQCLRGSRIPFKTMSRQIQWEDGAGAGLYRIVR

SEQ ID NO: 1402 - protein, 1027 aa, synthetic construct
  source 1..1027: note = Description of Artificial Sequence: Synthetic polypeptide
MNMVSICKRCDRSFTTLKGLNIHKGQCKIFVSNTNKQINNVVNNELTTPNKNKVEINTILNCDEISVEHYSTNTPYLPKINICESIIDPNDYLWGHMPFSFLLNHVNTIYDEIVFYHKNLFKVPSGKGGKMFIEELTFWLKQFNNRTKLNGIAMKCFMIVPSLMLQKPSIRSKAKEHAECLVRRITLWRNGNFSELMREIRYIQSKINTSKKKRTFEDISRIFAKLMMEGKVAAALKVLDRESSGILQCSESVLKELKSKHPDETPVQDNCLLYGPLQNTPECLFDSIDEISIFNSALQTKGSAGPSGMDADLYRRVLCSKCFGPSCKTLREEIATFTKNIATKSYQPDIVQPYIACRLIPLDKNPGIRPIGIGEVLRRIVGKTISHHCQKEIKEAAGPLQTCAGHGAGAEAAIHAMQKIFHQEDTDGVLLIDARNAFNCLNRSVALHNIQITCPILAMYLVNTYRKPAKLFIYGGETIFSKEGTTQGDPLAMPWYSLSTVTIINTLKLVIPDVKQVWLADDATAAGKLQSLKKWYKCLEDVGGLYGYYVNQSKCWLIVKSDNQAEEAKLIFGNSINITTQGKRHLGAALGSEAYKKVYCEDLVSKWSKELNNLCEIATTQPQAAYSAFIKGYRSKFTYFLRTIEAFENFVTPVEKILSEKLLPVLFGTDCSIIKENRDLLALNPSEGGLGICNLITEAKEQHTASKKITNLHIKSILDQSDVMKEKDDFGKTFSEIKTKTNMDKSKKKKEEVKKIHAGLPENLKLLVEQACDKGASSWLNTLPIKEQHLDLNKEEFKDALRLRYNVPLANLPSYCACGEKFDELHAMSCKKGGFVCNRHDNIRDLLTVCLNKVCTDVQAEPHLIPLTNEKFNFKTANTNDEARLDIKAKGFWRKGETAFFDVRVTHVNSKSSKKQPTKHIFRRHEDAKKREYLERVLEVEHGTFTPLIFGTNGGFGDECKRFTALLAQKLSLKMGERYGAVINWLRTRLSMEITRASLLCLRGSRTPFRHYNTDDVGLENVQCGLI

SEQ ID NO: 1403 - protein, 1068 aa, synthetic construct
  source 1..1068: note = Description of Artificial Sequence: Synthetic polypeptide
  VARIANT 33: note = Any amino acid
  VARIANT 100: note = Any amino acid
  VARIANT 350: note = Any amino acid
MASSSTSSSDICLCPFRSFHCCPNGEVGSKGIXRMISHIKRHHLLTEDRKCVLREALSSDVGLFMAVEETLKAFGQWMCGKCMTLHALSRYCHHPDGRVXFVTGADGSSRYIVGILKPSTKESVTNALGGLVFDVGLLDRVFKEPITTVKSIPHSCRLAFSQALKTALYKVIAQPGSVDAWICLLLLPRCTLQVFRPKNRQECRSGNRKSLQQSSILKSLDTWGKEDGIRKLVQNMLDNPEVGAMGQGGGILQKESTSSNTNIRQCLRKVADGHFTAAVKVLCSSGVAPYNGDTIKALEDKHPFRPPPSMPSPIISEPPLVADFDCVFGCIKSFPKGTSCGRDGLRAQHXLDALCGEGSAIATDLIRAITSVVNLWLAGRCPTILAEFVASAPLTPLIKPDNGIRPIAVGTIWRRLVSKVAMKGVGKEMAKYLNDFQFGVGVSGGAEVVLHSANRVLSEHHADGSLAMLTVDFSNAFNLVDRSALLHEVKRMCPSISLWVNFLYGQAARLYIGDQHIWSATGVQQGDPLGPLLFALVLHPLVHKIRDNCKLLLHAWYLDDGTVIGDSEEVARVLNIIRVNGPGLGLELNIKKTEIFWPSCDGRKLRADLFPTDIGRPSLGVKLLGGAVSRDAGFISGLAMKRAVNAVDLMGLLPQLCDPQSELLLLRSCMGIAKLFFGLRTCQPVHIEEAALFFDKGLRRSIEDMVVCGGPFFGDIQWRLASLPIRFGGLGLYSAYEVSSYAFVASRAQSWALQDHILRDSGICGMDSDYLCAMTRLRDTIPGFDCSGFTNKDTPPKSQKALACALFSKIVKDMEVDFDMTVRQKAVFECLRAPHAQDFLLTIPIDGLGQHMSPVEYRTILRYRLMIPLFPIDEICPVCRKACLDTFGEHAVHCRELPGFKYRHDVVRDVLFDACRRAGISAKKEAPVNFLTDPQDGRSTLRPADILVFGWVGGKHACVDLTGVSPLVGLRSGGFTAGHAALKAAACKVAKHENACIENQHVFVPFAFDTFGFLAPEAVELLNRVQRVMHSNVISPRSTDVVFKRISFAIQKGLAAQLVARLPSIDMY

SEQ ID NO: 1404 - protein, 1461 aa, synthetic construct
  source 1..1461: note = Description of Artificial Sequence: Synthetic polypeptide
MATESGGEDSWTQVRGAKRPSAESPPSNTTTSPSQTHRSAKHTKHGSARHDRNHVFPDPMTTPLRPHARHSVPTARASSHVPSTSPAAGATESSARAVVPAAEPVTRTSNGGGEQHPIIGNTSNASPRTPRTPSSPRSFAQVAAAMPAAATATSSAPMTEDLSASVPSEPNGSGEQQPSPESTGQTHHSIPNTPSDFLTMSSDESDSPPRSTALRAPTPIAPPAHDGDGDTNGSATPEPLVQSPTPAQMVLPYPSGTQQTHSDPSPPSASPPATTILPAAISHPVEHSEHANSAPLGEVSESETHNTAGEHSESEQDVLLSDPAPPIAANVLDAQRKVLLKTSGHRQLLACPFGLCKCKGPRLDRKAWVNHVLREHPYDEQATDLVKQVMEAKLVAQCNKCHLFFEAAGISQHRSRCGANLKRATEALFHAAGHDLLEIMRGAWPQQCVGSRISVCELLKLARHPLMQRSRYPSNATETKLMAATLSQLYWSAVHSDYTAEEREMCWALILALPSMLLSAPSTALSTIDLRNMFHDRLRWLVTGQLGRVVDAMRKAVARKQSRRGQLNAGAGAHPNDAVDQSLRSLVRDPDLADEAWANHVTNRLNRGQIAKAFDADKARAVIGNSEVQAVRDLLVPPGLTPYIASTPASTSTLAPATAVSSPTVSFTKGELPKALAATKGVTDPYGWSGELLASIYRIKEHFSQVLGPRQGSTSDPTAPSDGDAPQGPTTATGGPQVALNKIFHHIANNTVPESIRHALCSINYTILEKANGKFRPVGTDSIFNKVVNRALLEQQQPHIAHLLQASPELAVGVKDGISAAVGMAFGELQACESTPGWTMLSLDFKSAFNYTDRARLHEIVADKVPGLLRAFERHYARPTTHCIVDKFFKVIDIDVGQGIVQGNELSPFFFALYSCEVLGLLDATTDYRCKVIKYLDDIVLMGPAEDVAADVEIVKARAESAGLHLQPSKSRFYMPRHHSASITAIKSVLPDAVRETANTGMTVLGTPIGRREWMKKQLNDKAKHIAGKLNDMLTTGVSLQALLTAMQYVPSLINHLYTLPPSLTSGLSELLNRACKDTFVKAFFAKVNLSAPAGAEGHDVTLEQLLEARLFTRANTGGFGLHDLVERGPVAYVCNMAKLATRYPRVYDRLLEDASRAADFEAHVQRAGFQMATVKDAATQRPAEIIALRSKAALDDLMAKCALDLQQAYLASREWGVSTVLTMRGRDKLRRLSDTTFAIAVVSMMGFGLHELINVKPTDKCPLCSSKTPQPRLTREHLLTCRPIKRHNALRDEMGRLLRYATLSHVWVEKSGYNANGQSCRIDLHCRNPFPGGALGPALPDLGIDVTVRTAQPPTTSQACIKVGAALRRAEKEKRDYYTGFNHGKTLIVPAAMTTTGGFASSFVDLLGQLARCAEARGVYQPGLDEAFVPRWKGRFAALVHQMNADHIQRHFGGVCLRSS

SEQ ID NO: 1405 - protein, 1095 aa, synthetic construct
  source 1..1095: note = Description of Artificial Sequence: Synthetic polypeptide
  VARIANT 276: note = Any amino acid
MSSCKVTIPHVCPYCKVELKTICGINRHILKCKKNPLQIPSLQKTNTSLTLEPNTKVIPSITKQNDIIIASTSSNNLAFNQKKDYTLTPTYSRKTTPVSILSSMKMTPISITSHIVRRKLPELPSQTTNHLFNENFINVPFLPEIMNHLPVPNNNVMWGVYSYQQFKLFVDSTYDEIVNYRRNIFNIPSGKAGKEFIEELTFWLRKFNSTSSLNSIALKVTMILPNLLLQKPSAKSKSKEHTLCLTRRIDLWKKGDTSLLLKEVRNIQKKFVNSKXKRSMDDISRIFAKLIMEGKITAALKFLEKEASSGILPLSDNTLKDLKSKHPEPSRVEDYSLLFGPIDLIPKCFFDCIDEQLVMKAAFATKGSAGPSGMDADIYRRILCSKNFIKEGKELRKEIAKMTQNLLTETYEPTFLEAFTACRLIPLDKNPGIRPIGVGEVLRRIIGKVISWSFNSEIKEAAGPLQTCAGHGAGAEAAVHAMKEIFDNVQTDAILLIDAKNAFNCMNRQVALHNIQIICPLISIYLINTYRNPSRLFVAGGKEISSQEGTTQGDPLAMPWYSCNTTIIIEHLLVNYPQVKQVWLADDAAASGSIANLHSWYQHLIDEGCKHGYYVNQSKCWLIVKSPSLAENAGIVFGKSVNITTEGQRHLGSVIGSQNFKNKYCTEKVAKWLTELKQLCKVAETQPQAAFIAFTKGFRSKFTYFLRTIPKFEQYLAPVDEILSHLLLPTLFGKDTPFEDHIRKLFTLTPRDGGLGIPILVEEAPHQFLSSVKLTKNLVQQIIDQDKILKTKNSSGNVLEDLEKILTTDRLKHRKEKIIAVDSMQPDSMLRNIQQTRSECASTWLNALPLENQGFVLNKEEFRDALCLRYNFDLKNIPRICECGEPFNVTHALSCKKGGFISSRHDNIRNLFTTLLKRVCINVQSEPHLIPLDNENFYFHTANKSNQARLDIKANGFWRNGQTAFFDVRVTHVNSMSNKNLDIAAIFRKHEKEKKREYGERVREVEHGSLTPLVFGTNGGMGKECHRFVRRLAEKLAEKQNEKYSVVMTWLRTKLSFEILRSTILCLRGSRTPWTKKNDFEIGVDFKMDALEARI

SEQ ID NO: 1406 - protein, 1070 aa, synthetic construct
  source 1..1070: note = Description of Artificial Sequence: Synthetic polypeptide
MVCPTCNGVYADYNDHIRKKHPDERYTALQLQPLGLTPCPICKTACKNDLGVKTHLSKIHKISGASKISTQPRIRTENTDNTNSVPTSSFNPVLPEIQTLTPGLNNSRWADNPRKRRADTPSPTRGRNTRPRRFSYTDIDLTNDEPADNPRANNPRVNNPRVNNEPPSSPNSLPSISEFHTPGTLPLTNSNISLKDQHDKITGPILQKPLIQKLIEYSKIPIPEHHLHARQAKIFADAANRIAKNFIQSPTEKTLFNLLILPRIFGIGLINGKVTKIMQNFPSQIPPIPKIDFPSEKTDSDPVLNAKKLLEKGYIGRAAKAIIDPTPVAPETPESLNILREKHPIGQNNPFNTKSQPISGRQITEKAILLAISSIGREKAPGLSGWTRSLLDAAIKIPTQNDVIPALRLLTDMIRQGTAPGRELLCASRLIGLSKPDGGVRPIAVGDLLYKIAFKAILNTLWSPNCLLPYQLGVNSIGGVEPAIFTLEEAIMGPNINGIKSITSLDLKNAFNSVSRAAIASSVAKYAPTFYRSTCWAYNQPSILITENGSVLASAQGIRQGDPLGPLLFSLAFRPTLETIQKSLPYTYIAAYLDDVYILSKTPVKDKIAKIIEKSPFTLNSAKTTETDIDTLKTNGLKTLGSFIGPTELRKEFLQNKIQNFESSINALKKLPKQYGLLILRKSTQLLLRHLLRTLNSQDLWELWEKTDKLIADFVINLTVTKRKKRPITDFVTPLITLPIKDGGFGLLRHNGIAQDIYFAAKDLTTEIRHKIQRISNDFPQNQSPTATEILHLLHNGVLADCKNGLTNAQLNALTENASYLGRKWLNILPIQKSNRLTDWEMAEAVRLRLLAPVKPLTHPCNHCGNRTNINHEDVCKGAVRKYTARHDQINRSFVNSLKSRPEIDVEIEPDLNNENNVNNANTTTENPTPSPNGQNDTGCLFTTPIRSGTRNGQNGLRADFAVINGVSKYYYDVQIVAINKDSGNTNPLNTLADAANNKRRKYQFLDPFFHPIIISAGGLMEKDTAQAYKQIQKLIGPVAAHWLDTSISLILLRSRTTAAISIAKNRPRA

SEQ ID NO: 1407 - protein, 1101 aa, synthetic construct
  source 1..1101: note = Description of Artificial Sequence: Synthetic polypeptide
MNAVCVCGKVCKNQRGLRIHQTKMACLRRVQAEHRSGAVATTVEPVLSASAPGQTEEDQGPEAPHSARNLRATPAPPQGRKSDHHRVKWPAANSKEWSQFDEDVDMILESVSRGSTDQKLQSMCTVIMSMGAERFGTIGQRKPTDTMKPNRREVKIRQLRQELKSLRRSFKASTSGEERAALAELTHHLREKLRTLRRAEWHKKKGKERARKRSAFITNPFGFTKRLLGQKRSGNLTCPVEEINLHLSNTFSDASRDVDLGPCPLLVTSPEPEVHFDISEPTLKEVRETVKAARSSSAPGPSGVVYKVYKHCPRLVVRLWRILKVVWRRGKVAADWRQAEGVWIPKEEESSKVDQFRLISLLSVEGKIFFKIVAQRLIKYLLDNQYIDTSVQKGGVPGVPGCLEHTGVVTQLIREAKENRGDLAVLWLDLANAYGSIPHKLVETALTRHHVPESIQNLILDYYSNFWLRAGSSTATSAWQRLEKGIITGCTISVPLFALAMNMIVKGAEAGCRGPVSRSGTRQPPIRAFMDDLTVMTATVPVCRWLLQGLERLITWARMSFKPAKSRSLVLKKGKVAERFRFTLGGTQIPTVSEKPVKSLGKVFNSSLKDTASVQQTRSDLTTWLEGIDKTGLPGSFKAWMFQHGVLPRVLWPLLVYEVPMTMVEQLERTISRFLRKWLGLPRSLSNIALYGRSTKLQLPLSGLTEEFKVTRAREVLMYRDSSDSKVSSAGIHVRTGRKWKAQEAVDQAEARLRHSVLVGSVAVGRAGLGSCPKPRYDKVSGKEKRLLIQDEIRAGEEEDRRCRMVGMRKQGAWTRWEHADSRKVTWPELCRAEPSRIKFLISSVYDVLPSPANLHVWGLAETPSCQLCQRRGTLEHILSCCPKALGEGRYRWRHDQVLRVLADTVSNAIQSSRSQQPPKKSIVFVRAGEKTRQQPTSAGGLLSTARDWQLLVDLGRQLKFPEHIVATSLRPDMVLVSESTRQVVLLELTVPWEERISEANERKRAKYAELVVQSQSNGWRARCVPVEVGCRGFAGQSLAYVLKLLGVRGFRLRKSIRDILEAAEKASRWLWFRRGEPWKPHGHRSGNDQPRLGRPGEGVW

SEQ ID NO: 1408 - protein, 1087 aa, synthetic construct
  source 1..1087: note = Description of Artificial Sequence: Synthetic polypeptide
MTHANEQTTNKIYVTCICGKLCKNHWGLKIHQARMKCLEQESKVQRTGPEPGETQEEPGPEATHRAKSLHVPEPQTPSEVVQQRIKWPPASKGSEWLQFDEDVSNIIQAIAKGDADSRLKTMTTIIFSYALERFGCIEKGKTKPTTPYTMNRRATQIHHLRQELRSLKKLYKKATDEEKQPLAELKNILRKKLMILRRAEWHRRRGRERARKRAAFITNPFGFTKQLLGDKRSGRLECSIEEVNRFIEETVSDPLREQELEPNKALISPTPPAREFSLRGPSLKEVKEIIKASRSASTPGPSGIPYLVYKRCPGLLLHLWKILKVIWQRGRVAEQWRCAEGVWIPKEENSKNINQFRIISLLSVEGKVFFSIVSRRLTEFLLENNYIDPSVQKGGIPGAPGCLEHTGVVTQLIREAHENRGDLVVLWLDLANAYGSIPHKLVELALHRHHVPSKIKDLILDYYNNFKMRVTSGSETSSWHRIGKGIITGCTISVILFALAMNMVVKSAEVECRGPLTKSGVRQPPIRAYMDDLTITTTTVPGSRWILQGLERLIAWARMSFKPSKSRSMVLKKGKVVDKFHFSISGSVIPTITEQPVKSLGKLFDSSLKDSAAIQKSKKELGAWLAKVDKSGLPGRFKAWIYQHSILPRVLWPLLIYAVPMSTVESLERKISGFLRKWLGLPRSLTSAALYGTSNTLQLPFSGLTEEFMVVRTREALQYRDSRDGKVSSACIEVRTGRKWNAGKAVEVAESRLQQKALVGTVATGRAGLGYFPKTLVSQVKGKERHHLLQGEVRASVEEERVSRVVGLRQQGAWTRWNTLQRRITWANILQADFQRVRFLVQAVYDVLPSPSNLHVWGKNETPSCLLCSGRGSLEHLLSSCPKALADGRYRWRHDQVLKAIAASLASAINTSKNHRAPRKAVHFIKAGEKPRALPQLTTGLLHKASDWQLEVDLGKQLRFPHHIAATRLRPDIIAISEASRQLIILELTVPWEERIEEANERKRAKYQELVEECRERGWRTYYEPIEIGCRGFAGRSLCKVLSRLGITGVAKKRAIRSASEAAEKATRWLWIKRADPWTAVGTQVGT

SEQ ID NO: 1409 - protein, 1001 aa, synthetic construct
  source 1..1001: note = Description of Artificial Sequence: Synthetic polypeptide
MALPAVRSGPASTWTLLITLVIVAAKGTDGFMSFKLPLLSTDTWSGYNNDVKTLLGPLHHELATNEMSPKLAGEGFSDIMCDFMASKPEFSHTTEESHSEGYISHEPQSLAQVKRLKNKLRKKAFRADATPEDRKAFRDAIKTYSFMKRQQKRKETTKSAAHQEKEYHKNFWKFAGKCAKGQLDIPPVKPAFSVYYANEYYKNKYSHPTRVDFNKLLWFPHLPVEEQLPANSFDMSPVRPKDIKAVLSKRCATSAPGPDGIMYGHLKHLPACHLFLSTLFSKLLESGDPPTSWSSGNVSLIHKDGSPEAAENFRMICLTSCVSKIFHQILSERWAKYMTCNDLIDPETQKAFLTGINGCVEHVQVMREILAHAKKNRRTVHITWFDLADAFGSVEHELIYYQMERNGFPPIITTYIKNLYSRLKGKVKGPGWESDPFPFGRGVFQGDNLSPIIFLTVFQPILQHLKGVEQQHGYNLNDKHYVTLPFADDFCLITTNKRQHQKLITQISSNTKSMNLKLKPRKCKSMSIVSGKPSDISFTIDGDPVKTTKDAPEKFLGGYITFLSKTKETYDILAKTIETTVENINKSAIRNEYKLRVYMEYAFPSWRYMLMVHDLTDTQLQKLDSIHTKAIKTWLRMQPSATNAILYNTRGLNFKSISDLYLEAHALAYSRSVLKADEKVKHALQAKLDRESQWTRKMQKWGIGKCHTIHQQAIHVAKDSEWTSVRKHVKQQVTDMRHDVWTKHQENLLQQGQMLQLLEEEKCDLTWRSAMYNLPRGILSFAVRASIDALPTLCNLTTWGKRNTDKCKLCGNRETLHHVLNHCGVALQQGRYTFRHNSVLKHITDTIIESIDTSRINATIYADIQGYTTNGGTIPVHTIPTTQKPDLIIYLPEQKTLHIHELTVPFEKNIKTSHDRKVNKYSTLAADLETAGISATLTCFEVGSRGLVTPENKTRLRTLFKIVKAKPPKTLFTDISRIAMLSSYAIWNSRHEPYWESETLL

SEQ ID NO: 1410 - protein, 1074 aa, synthetic construct
  source 1..1074: note = Description of Artificial Sequence: Synthetic polypeptide
MTTHRAEVTTSGKTQEEPGPEATHSAQSLLVSPTPAAGRSPATQSCPQVTAAHNSPQSPQSQQVAVTRSDCVPLAQPRIQWPQSSKKAEWLQFDKDVNQILEVTGKGGVDQRLSTMTTLIVNIAAERFGTVTPKPTPSTYTPSHRVKEIKRLRKELKLLKRQYKAAGEVERAGLEDLRGILRKQLVNLCRAEYHRKRRRERARKRAAFLANPFKLTKQLLGQKRTGKLTCSKEAINNHLKATYSDPNREQPLGPCGALLTPPEPTSEFNMKEPCRSEVEEVVRRARSSSAPGPSGVPYKVYKNCPKLLHRLWKALKVIWRRGKIAQPWRYAEGVYIPKEEKSENIDQFRVISLLSVESKIFFSIVAKRLSNFLLSNKYIDTSMQKGGIPGVPGCLEHTGVVTQLIREAREGRGDLAVLWLDLTNAYGSIPHKLVEVALEKHHVPQKVKDLIIDYYSKFSLRVSSGQLTSDWHQLEVGIITGCTISVTLFALAMNMMVKAAETECRGPLSKSGVRQPPIRAFMDDLTVTTTSVPGARWILQGLERLVAWARMSFKPAKSRSLVLRKGKVRDEFRFRLGQHQIPSVTERPVKSLGKAFNCSLNDRDSIRETSTAMEAWLKAVDKSGLPGRFKAWVYQHGILPRLLWPLLIYEVPMTVVEGFEQKVSSYLRRWLGLPRSLSNIALYGNTNKLKLPFGSVREEFIVARTREHLQYSGSRDAKVSGAGIVIRTGRKWRAAEAVEQAETRLKHKAILGAVAQGRAGLGSLAATRYDSASGRERQRLVQEEVRASVEEERTSRAVAMRQQGAWMKWEQAMERNVTWKDIWTWNPLRIRFLIQGVYDVLPSPSNLYIWGRVETPACPLCSKPGTLEHILSSCSKALGEGRYRWRHDQVLKSIAEAISKGIKDSRYRQATAKVIQFIKEGQRPERTAKNCSAGLLSTARDWVMTVDLERQLKIPPHITQSTLRPDIILVSEATKQLILLELTVPWEERMEEAQERKRGKYQELVEQCRANGWRTRCMPVEVGSRGFASYTLSKAYGTLGITGTNRRRALSNNVEAAEKASRWLWLKRGEQWGQ

SEQ ID NO: 1411 - protein, 1085 aa, synthetic construct
  source 1..1085: note = Description of Artificial Sequence: Synthetic polypeptide
  VARIANT 172: note = Any amino acid
  VARIANT 744: note = Any amino acid
  VARIANT 910: note = Any amino acid
  VARIANT 944: note = Any amino acid
  VARIANT 1056: note = Any amino acid
  VARIANT 1068: note = Any amino acid
MTPAMEMTTTVTCICSKLCKNQRGLKIHQARMKCLEREVEVQRTGPGPGETQEEPGQEATHRSQSLHVPEPPNPNRVVQQQRIKWPPANRRSEWLQFDEDVSNIIQATAKGDVDSRLQAISTIIVSYGSERFGRIEKGNTETTSYTMNRRSFKIHQLRKELRTLKKQFKRAXDGDKQALKELYNILRKKLKTLRRAEWHRRRGRERARKRAAFIANPFRFSKQLLGDKRSGRLECSREEVNRFLQNTMSDPLRGQDLGPNRALISPAPPSAEFKLAEPSLKEVEEVIKAARSASSPGPSGVPYLVYKRCPEILRHLWKALKVIWRRGRVADQWRCAEGLWIPKEEDSKNINQFRTISLLSVEGKVFFSIVSRRLTEFLLKNNYIDTSVQKGGIPGVPGCLEHNGVVTQLIREAHESKGELAVLWLDLTNAYGSIPHKLVELALHLHHVPSKIKDLILDYYNNFRLRVTSGSVTSDWHRLEKGIITGCTISVVLFVLAMNMVVKAAEVECRGPLSRSGVRQPPIRAYMDDLTVTTTSVPGCRWILQGLERLILWARMSFKPTKSRSMVLKKGKVVDKFRFSISGTVIPSITEQPVKSLGKLFDSSLKDTAAIQKSTEELGGWLTKVDKSGLPGRFKAWIYQYSILPRVLWPLLVYAVPVTTVESFERKISSFLRRWLGLPRSLNSAALYGTSNTLQLPFSGLTEEFKVARTREALQYRDSRDCKVSSAGIEVKTGRKWKAEKAVXVAESRLRQKALVGAVATGRTGLGYFPKTQVSHARGKERNHLLQEEVRAGVEEERVGRAVGLRQQGAWTRWESALQRKVTWSNIMQADFHRVRFLVAAVYDALPSPANLHAWGKSETPTCSLCSGRGSLEHLLSSCPKSLADGRYRWRHDQVLKAVAESIALAISTXKHHHAPKKAISFIKAGERPRAGPQITTGLLHTAXDWQLHVDLGKQLIFPQHIATTSLRPDMIIISEASKHLIMLELTVPWEERIEEANERKRAKYQELVEECRGRGWRTFYEPIEVGCRGFAGRSLCKAFGRLGVTGTAKKRAIKXASEAAERATRWXWLKRADPWVATGTQAGS

SEQ ID NO: 1412 - protein, 1112 aa, synthetic construct
  source 1..1112: note = Description of Artificial Sequence: Synthetic polypeptide
MATTQASVKPTAVATCVCGKICKNPRGLKIHQTKMGCLASVQPEQRARFSLSESREVPARAEPYGPQQPHSPEALGETQEERGQESPHSAQNLRAQVAQAPDNPQHHRRVKWPPASKVSEWQQLDEDLEGILESTAKGGVDRKLQTMTTLVISFATERYGTMEKRAAPEKYTKNRRAEKISQLRQELRVLKKQFKGASEDQKPGLAELRCTLRKKLLTLRRAEWHRRRAKERAKKRAAFLANPFGFTKQLLGQKRSAHLECAKEEVDSYLHDTFSDAERENSLGECRVLISPPEPACSFNTKAPTWKEIQTVVRAARNNSAPGPNGVPYLVYKRCPKLLARLWKILRVIWRRGKVAHQWRWAEGVWVPKEEKSTLIEQFRTISLLNVEGKIFFSILSHRLSDFLLKNQYIDSSVQKGGIPGVPGCLEHCGVVTQLIREAREGRGSLAVLWLDLANAYGSIPHKLVEMALARHHVPGPIKTLIMDYYDSFHLRVTSGSVTSEWHRLEKGIITGCTISVIIFALAMNMLAKSAEPECRGPITKSGIRQPPIRAFMDDLTVTTTSVPGCRWILQGLERLMTWARMRFKPGKSRSLVLKAGKVTDRFRFYLGGTQIPSVSEKPVKSLGKMFDGSLKDAASIRETNDQLGHWLTLVDKSGLPGKFKAWVYQHGILPRILWPLLVYEFPISTVEGLERRVSSCLRRWLGLPRSLSSNALYGNNNKLTLPFSSLAEEFMVTRAREVLQYRESKDPKVALAGIEVRTGRRWRAQEAVDQAESRLHHKELVGAVATGRAGLGTTPTTHLSRLKGKERRDQVQLEVRASIEEQRASQWVGLRQQGAWTRWEEAMARKISWPELWRAEPLRIRFLIQSVYDVLPSPSNLFLWGKVESPSCPLCQGRGTLEHILSSCPKALGEGRYRWRHDQVLKAIAESISSAMEYSKRLPLPGRGVRFVRAGEQPPPQPRAQPGLLATARDWQLRVDLGKQLKFPENIVETNLRPDIVLHSQSSKQVILLELTVPWEERMEEAYERKAGKYAELVEDCRRAGWRSRCLPIEVGGRGFAGKSLCKAFSLLGITGMRRRKAICAASEAAERASRWLWIQRDKPWTSASWTQAGN

SEQ ID NO: 1413 - protein, 1522 aa, synthetic construct
  source 1..1522: note = Description of Artificial Sequence: Synthetic polypeptide
MMDSRQLNTPKIRKYQNPKMTNDIMKSYNYAVLSDVTPQETTQTTTHLNVDIDNETTQPKQPLTKSGKPKSKPIAVSYKFKDATFIWDTTPQTNPPRDCTKLIDKTRPRKTIFKKSAFQSYLKKELSNETFVEVKTFLMATHKYRFKDENSRLLAYRIINRYVMETANEFKETEFDMARFAKFFTIPENWLKHLKPYSTATETSPADRIKVQKLVDLTCRYPFKTQEEQTSVANFLHFFTQRSIIGISRDYKFQKFIPFMARKNTRPETTSTMVTTSPTEQNRLPMVIITPLEEPKSEHRRPEKRGASNDTIVLSDEEFPLLKRRTLPTRKSKNPTGAGNVPTETECTDEVKFILNNEYQIECKECGKVWENVRNGLNHLRQKHDFPNRTDVMVSCVRCEVPIKGAECVNHIKNHKKDDKEESEAGSLVANTQDIPNESSLSQAAIEVYLRNILKMKENQERNIQYLEPSTANFLINRNLRAFYQNVKIEKLIGWEQVIWLIHWNKCHWIVYLANCDSKTSVILDSDNQMTLQQRCNIKAKFDKFLEGTFEEKTVLGTLERKVPQQPNNFDCGIYVIQYISDFLKDPQRIDYHTPDSKRIRKEIGELILEEMKNPASKIKNPNKEIQSLLQKFRLLQINVNDVFHWFAAEYQKSLPKIRTKRDGKLNKLSCSYQIQRLFGLAPKRAVKEIYFQETSTADLETRVLNEHFKKDESTMKECKIKNGNHYQDWITKAQIDNKEILEALKNSTDSAPGEDNIPLRQWIIWNNDGVLFDMFNYIKRTHDIPDMWKNYTTTLLIKPGKSQESNIPANWRPISILPTSYRIFMKVLNKRVLEWANRGELISKWQKAVDKANGCDEHSYVIQALIEKANRSYYKNEQCHLAFLDLADAFGSIPFQVIWHTLKNMGMDEETINLLKEIYKDCSTKYKCGKNESEKIKITKGVRQGCPLSMTLFSLCIQYLIQGIAEKKKGATIAGQEVCILAYADDLVIVANTAKDMQMLLTTIENLAKQADLIFKPAKCGYYRDPRDKKSMMKIYGKEISIVDEKNVYTYLGVRIGDTKKKDLNVRFEEVKKKTTAIFKSKLRSDQKLEAYNIFCQSKFVYILQGEDIAKTKIETYDEEIKKMIKEDILKLQDKSPFTDFVIYSPREKGGLGITKIIDEQTIQTINRTAKLLNSSHRAIRAIIYEELIQVANLRGEKEINTIEEALKWLEGTNKYKKNSNAKTTWITRVREAFQTLEKKHKIKVRFVPKENCIGYKIKCDTQEKIVELDNSKELSKSLHWMIKEAYYKEWKALKCQGYIISLKTSEFMEWKMPRGLPDPDWRFLTKVKANMLDVNMKQANQGGRLGSTKCRKCEDKESASHVINHCASGNWSRVEKHNQVQNELAKELTKRNISFEKDSIPKETKESLRPDLVIRLKDKIMIVDIKCPFDEESAIESARNKNIDKYRELAKEIQAKTGLQTTVSTFVVCSLGTWDKRNNELLRQMGIRYEESKEMRINMIQKAIHGSRKTYDHHRNFNNG

SEQ ID NO: 1414 - protein, 1870 aa, synthetic construct
  source 1..1870: note = Description of Artificial Sequence: Synthetic polypeptide
  VARIANT 4: note = Any amino acid
  VARIANT 151: note = Any amino acid
  VARIANT 153: note = Any amino acid
  VARIANT 154: note = Any amino acid
  VARIANT 187: note = Any amino acid
  VARIANT 202: note = Any amino acid
  VARIANT 245: note = Any amino acid
  VARIANT 250: note = Any amino acid
  VARIANT 1545: note = Any amino acid
  VARIANT 1547: note = Any amino acid
  VARIANT 1679: note = Any amino acid
  VARIANT 1774: note = Any amino acid
  VARIANT 1809: note = Any amino acid
MPLXISDCVHLVSAEGDTMNGRSTCGPLSRSSSVVSRSRSSPSPSVPPHPSPSIGPDTGLSAGIIGTSRGCSLWLPEVDNALSQWLRKGLERDHEVLVCGFEAAKPLSLSKARLLRKTPRNTGVVRHILEFDGRLVHTNCNETECVLSTLXSXXAVEVVRISLKCEPREPCEPKCVLSILCSDKIVXISFECETREPFPFFXDRKFREPIPFVFERMYDPRDPIPSFICWMYDLRQRMTPGTLPXNPLSXENKDSWGRPAVIKNEIRSMRSYLEENVKENRLNLLRRLRGGGEGKKMIRKLVAEKKSDTEAVCRILYPLDDRYECFVDGCETTSTMGYGSSDLKYMTTHIKKEHGVKVQWTYECSLCNKQAPFMGGAASKWVTAHMATKHTETVKLKLKPSISTTAKVAAKLDEIAVSLPKPRQVRVLRDPDEVKEKVAKPTLASTREEVKRNALRNMAPLVELSSQNQLTGAERPEETSEAMRLEECRTPEKIAELEGKIQTRTVTKKLSALKESMEKRTREEKVGKPSLAPIHEEVKKTARRSLAPLVEPSTFTHLTGASRLQAVRDAFSKANKDAAAKRRSSLAKPARLSEIMNTTFTKETVNETKEPVNDTDESIATIQPQVRVYRFNTWCLDHETTREAWLTGEVVDWFMGKVTEKKDQYRVFDSLVWSMYKFHGVGYVLDLMRDPLTYFLPICEHDHWVLLVIDEKGIWYGDSKGAEPCREIAKFIEETKRERRMFPVPVPLQRDGVNCGVHICLMVKSIVNGEPWYTEEEVKVFRRNVKRGLKEFGFELYSERIVYVGDDSIKVNDEHDDDVVFLSEETNNTTFTIEQAEDPAEEDAQHLESPVKPVKLMELKIPKIEIKKKEIRRKPKQQIEKKRKVPTGKPDELLVRVRLWLEREVQSYFDSGKRFQRLEWILDVLTAAIHKATAGDEQAIERIEKRSPPLEVEEGEMSTQTEPKKRERKEKESGCEMKASHKEMYFKNRSKAFNVIIGKDSKQCEIPIETLQKFFEGTTAETNVPAEVLKEMGSRLPKLEALDWMEANFIESEVSDAMKKTKDTAPGVDGLRYHHLKWFDPEYKMLTLLYNECKNHRKIPSHWKEAETILLYKGGDETRPDNWRPISLMPTIYKLYSSLWNRRIRSVGGVMSKCQRGFQEREGCNESIGILRTAIDVAKGKRRNLSVAWLDLTNAFGSVPHELIKSTLESYGFPEMVTEIVMDMYRGASIRIKSKNEKSEQIVIKSGVKQGDPISPTLFNMCLENVIRRHLDSASGHRCIKTKVKVLAFADDMAILAENRDQLQTELNKLDKECESLNLIFKPVKCASLIIERGMVNKNAEVVLRGKPIRNLDENGSYKYLGVHTGIATRVSTMQLLESVTKEMDLVNQSGMAPFQKLDCLKTFVLPKLTYMYANAIPKLTELKVFANLTMRMVKEIHEIPIKGSPLEYVQLPPSQGGLGVACPKITALITFLVNVMKKLWSSDSYIRKLYRDYLDEVAETETGMEEMTKEDIAKYLSGDVPIDKKAFGYNTFTRVRDVCNSLTXIXGAPLHKLKIVERDGDFAILVQATKEGMEKIFTCAQEKKLQQLLKAEVNTALAHRFFTEKPVKSAVMSVMRQYPQSNAFVKNGKNVSIAVHSWIHKARLNALHCNFNTYGENKSKVCRRCGKDVETQLHILQXCEYGLPKLINERHDAVLHVVRNLIRKGSKKDWKLKIDETVSSCNQLRPDIYMCSPDGKEVIMADVTCPYESGMQAMQESWNRKVTKYEGGFSHFXKMGKKFTVLPIVVGSLGTWWKPTTNSLVQLGIEKXTIRRVIPELCSMTMEYSKDVYWNHIFGDTFRKPPMRFGVEKPKGNSWKKEGSEPKGAASSD

SEQ ID NO: 1415 - protein, 2030 aa, synthetic construct
  source 1..2030: note = Description of Artificial Sequence: Synthetic polypeptide
  VARIANT 53: note = Any amino acid
  VARIANT 67: note = Any amino acid
  VARIANT 169: note = Any amino acid
  VARIANT 222: note = Any amino acid
  VARIANT 274: note = Any amino acid
  VARIANT 342: note = Any amino acid
  VARIANT 351: note = Any amino acid
  VARIANT 626: note = Any amino acid
  VARIANT 1031: note = Any amino acid
  VARIANT 1077: note = Any amino acid
  VARIANT 1239: note = Any amino acid
  VARIANT 1424: note = Any amino acid
  VARIANT 1437: note = Any amino acid
  VARIANT 1550: note = Any amino acid
  VARIANT 1726: note = Any amino acid
  VARIANT 1745: note = Any amino acid
WRRPAPKQTKNSSLHHLGHEVKRIARLKPGIFEFHAKPKNSSLHHLGHGVKRXARLKPGIFEFHAKXKNSSLHHLGHEVKRIARLKPGIFEFHAKPKNSSLHHLGHEVRRNSRLKPGIFGFYQKSKNSSLHHLGHEVRRIARLKPGILEFHAKNRIKSGLKVTFLSDLXAHAGALACSRFLASTLKTEHCRQKSFKPVGFLLHFLKNSSINEVASLRNVKKXFLEFFSGKPIGGMASFSRTKITFFKLCLKNFVLSAENPPIIRQKTNQNKASXVQIARGGHLSDCLPSQKMAGVLGRLFLSVQSTLSHRPFDTLLRSDDDKRGRKTIKLQFFIKENLVTPXVARDVKILXKQTKNNSGNSDSNSETKNFSKNKVSRQNGPLIGGGNHKKIGENQITRTLEIESKSDDNKVLVLRILYPTNDWYKCYSQWCQHKSLVGYGAHDLKYLTDHIKSTHSKKVEWSYQCSICDAKAEGTGTKAARWITAHMPKVHGIEATHRIKQNSEKTTNVKTANSLQEMALSLQKPKNGPKKVVMATSTTPEKKISELESKIQTREVAKQLSALKESAQKNQQGNKTKNVKSSLKTIAENTNETKKISARKSLINYLKPEDVLNHIPKEPKPASAKXGLQELTGAQRLQETRRRFMAGNRRDSIARRESLSLGKISNSFKIELKNAPEKTTLKKPAVTQKQNTSQNVSSSTVVKENKTGNDVITIDDTETVKRKINTWCLDHESTENAWMADDIIFWYIQKQIEISLDNKKFKVIDPLIWTTYRIYGVECVQDELVGFEKYFFPICENGHWVLLIIDDKRVWYSDSLADKPIEVIEDLINKLNRTQGKFNQTVPKQKDGFNCGVHVCLVAKSVITENFWYTEKDVNDFRKTVKLWLFSEGFELYSEPYKQIQNKNISVNSEKNQISDNEKNWGDKTQTVNESTLKERDEDIFLLRPHISVGVALKTEDEKNQKAENLKAPQKLKAIRRLKILKTCLKKLTAVKGKPEETERAAIPNLMAIKLKTPPKVEPVRRNPEKGENYXKSQPNKKRQIPTGKPDELVKKVREWFEIQFQAYFEDGKSFQRLEWXTGLLTAAIHKASAGDEQAVGKIIKRCPPLEIEEGEMATQTETKQKPKNQKSTKGANSSSSIREAYAENRARTFNKIIGKDDKCEIPIEKIEKFFENTTSNTNVPTETLARITSDLPKLEIGSWIEEEFREKEVAEALKKTKDTAPGVDGLRYHHLSWFDPKXKLLTKLYNECREHKKIPGHWKEAETVLLYKGGDETQAENWRPISLMPTICKLYSSLWNKRIKSVTGVLSKCQRGFQEREGCNESIAILRTAIEAAKGTKKSLSIAWLDLTNAFGSVPHESIEATLIAYGFPGMVTEVIKDMYNGASIRVKTKNEKSKQILIKSGVKQGDPISPTLFNICLESVIXRHLKSADGHKCIXSNIKLLAFADDMAILSDSKTKLQQELQKMDDDCTPLNLIFKPAKCASLIIEWGKVQKDQKIKLKGQFIRSLAEQDTYKYLGVQTGIETRVSAMQLMKKTVSELDKINCSALAXWQKLDAVKTFVLPKMTYMYANTVPKLSELKEFANITMRAIKVMQNIPVKGSPLEYVQLPIGKGGLGVACPKTTALITYLVSTMKKLWSTDDYIRKLHTDYLKMVAIKETKTKEVTLEDLASYLSDDKTVCKKAVGYNSFTRVREICKTLSKNKGALLSQLKIIAKDGKLAILVQAXKDGKTKIFTHDHVKTLQKXLKKEINEALLHRFTTEKRVKSEVVRVVQEYPQCNSFVRDGGKVSIGAHRFVHKARLNLLACNYNTWQDAATKQCRRCGYEKETQWHILSSCPKSMGGKITERHDSVLKTVKEMIQTGSLKNWKLKLDHELPGSTRLRPDIYLRSPNGSEIILGDVTIPYEHGIEAMQTAWQKKIEKYEEGFKYLRSTGKKLTIVPIVVGALGSWWKPTTDSLVSLGIDKNTVKRAIPEICSTVLEYSKNIYWNHIFGDSYQKVPMFFGGEKPKGQSWKKVKPPEGKTASNHEPPG

SEQ ID NO: 1416 - protein, 1719 aa, synthetic construct
  source 1..1719: note = Description of Artificial Sequence: Synthetic polypeptide
  VARIANT 138: note = Any amino acid
  VARIANT 766: note = Any amino acid
  VARIANT 797: note = Any amino acid
  VARIANT 966: note = Any amino acid
MTVFIDRGIGERGQMAVCSLHRYFSFSPFSPIPPYVNNGSFGENGCGTDKSLLPVIEVVVREVKINWSENILVVECLIMVKSGERVVVKRQNLEKVIQNLARINSTLFSNLGNQIFCVVPRIKDSTNKEQGYRKEKQXKFHVSFRSIKSQVPPYLRGGGDVMEDTEIRGIRKLEPEAQLDSSKPLICRVLYPTQGYMYKCFYPKCKGHSNGSTDLRSLKKHMVDKHFTNIEFAYKCATCMFLTTGKSATALKSIKAHMASHHKVTMEPGKKSLVQKLNARLEEAAPSLPMPRNRSKVIQLTPEKSISELEKKKQTRSVAKQLSTLKESAQKKEEEVKIAEVKKREPRLSIIPESNVRRSLAAGLEQCINPEQSVAQRIREKREEYAKASREAAAKRRSSLAMKPARLPDKENEITLQETKKIDDPIVIDLEKECILTTVLQVPRNQFNSWCLEHETTIDAWLTDEVIHMYMCTITENRKYFMAIDPVLWPVYVRNGAEDLLRRTSCPGTFFFPICESNHWVLLVIEHDVYWYLDPKGEEPKGNVEILLESMKRKRQYYEFPPPSQRDNVNCGVHVCLMAKSIVDECGYNWYSEEDVRSFRTNMKDILKSKGYELCPEPYNRQNLLKTEKQKEVILEEMIDSFVVEDDMTFTVHRDSDHGDDEVEHLKTIEQEPENEISEIENVEGSVDSVIPKLMEMRVQTPPVINEKRGKKRVSAKEKPRKQKEKEQKVPTGKPDELVKRVRVWFEKEFKSYVEDGKSFQRLEWXTDVLTAAIQKASAGDEKAVELIEKRCPPLEXEEGEMCTQTEKKKKPKSGKGNGGQESMKSLMASYSENRAKTYNRIIGKHSKQCEIPIAKVQKFFEGTTAETNVPKETLKEMCSRLPKVEVGTWIEGEFSESEVTEALKKTKDTAPGVDGLRYHHLKWFDPELKMLSQIYNECREHRKIPKHWKEAETILLYKGGDESKXDNWRPISLMPTIYKLYSSLWNRRIRAVKGVMSKCQRGFQEREGCNESIGILRTAIDVAKGKKRNIAVAWLDLTNAFGSVPHELIKETLESYGFPEIVVDVVEDMYRDASIRVTTRTEKSDQIMIKSGVKQGDPISPTLFNMCLESVIRRHLDRSVGHRCLKTKIKVLAFADDMAVLAESSEQLQKELTAMDADCSALNLLFKPAKCASLILEKGIVNRLNEVVLRGKPIRNLMENETYKYLGVQTGTETRVSIMDHITEVSREIDLVNMSQLAMHQKLDILKAFILPKMTYMYQNTTPKLSELKVFANLVMRSVKEFHNIPLKGSPLEYVQLPVGKGGLGVACPKNTALLTFLVTIMKKLWSSDSYIRKLYTDYLEEVAKVEIGKFEVNLNDLAEFLSDERAVDSKLFGFNAFTRVREVVRSLCKNKDSPLHSLKIIEREGKLAISVQATEESIEKIFTEDQEKKLMYLLKGELNTALQHRFFTQKVFKSEVMRVVQQHPQSNSFVRNGGKMSFSAQRFVHPGRLNQLPCNYNTWAKGRTKLCRRCAKNENETQSHILQVCDYSIGNIIKERHDAVLYKFRELIKRGSKGHWLERTDRTVPNTGSQLKPDLYLESPDGKHVILADVTVPYERGIEGMQKAWNEKINKYTDGYKEIFRRQGKSLVVLPLVVGSLGTWWKPTEESLIKLGVEKTTVRRIIPETCGMVAEYSKNCYWRHIYGEKYVQTPMINGGKKPEGNDWKKCEKGIEVPKVTN

SEQ ID NO: 1417 - protein, 1888 aa, synthetic construct
  source 1..1888: note = Description of Artificial Sequence: Synthetic polypeptide
MIPVLGTGGPEKLPLQSYVYCGNTAITDSFTPTAKTILKPEEQNLDIVLKNIAALNPENYSDLIRSLSKMEFRLDYPKEIENYWISEKLFSQSIASLPISLLVASMFSPEDRDLSTEPFHCNADGCNFHCDNCERMVEHIREHHNTDPMINTFETTEDTFRRITAIKIDKTGIEELNPLKYRCSYCDELFTEAEDHAIHMISHLTEKLSPDISFFFNDILRLYKTIDKPTVQNLFPETQVAIFDTLEETNRFRLIVGREAIETIEEAFPPSPPGTDRKPSIIITDTCQLRFVPCMDEPPKGDLGILTLLLRDFSAHNIPIKSLNNKELIADKDIDYSPDFVEGALANAEEHDTTNSQNNNGRYINSAEKLTEFLIQCEDYLTNIKTLEDLERFYTTIKDYRVNKEVIAEDTPIFVYFLVEEGKLPKPGLRCPLESYEGHEDKAFESLRKLCDHFKGEIAKTSFDPKVHTIDIWVEFLAQAYGTGTFVYKDENGNIDLDTHVFKCPYADCSYTNNDRSKLMDHMKTKKHAKNVYIERYGFFWGIVIEGVNRPKGIVYPTLKDIKEHACRKCPEAGCNTYVTELSDIKEHLKKKHKSTTAGVDGEIAHTDATYCWITKEELDALHAERARERAEQVDNTPVQQIINADNNEENNENQEDNGNNEEADALDPPNNTTETEDEAVHAVIINPPATEEEEVAIIAEARRNIPELQQAEERGCVTPKMTSLVRLKLLKGGGELFNKKLTPLATRYAATGNTEADKIKVDYLTLKCNAALREMIYTNNHSESKFMTAENGEDTAPPPRISEDTRDRIQKAANEIKGTLIKVVKHISHARCLKDSTRDDEHNKFVEMIAKIKNDLRDNKFEQYNIEEIFQGPISDQSILNIVNTEDNNEFIKKMDYINRILGTPQDASPYARKKLQACFADNPTKTLRNIILADKVPQQSLKPSEYLDYYGPQWANEAEGYENFLHHDYALPERYGQVFANDFLDFMTNESKIIEVIRNKNHLSAHGLDGIPNSVYMLFPVSAAKFLSILFRSIIISGHIPDCWKLSKTVMLFKKDDPSLAKNWRPIGITSCTYRIFMTLVNKALQMIPMFHAMQKGFVRGATLSEHIAVANEVLCQSTRTQSEMFQTAIDFTNAFGTVPHQLIFDSLEAKKVPDSIINLLKDLYKGARTAIYTRHAHSEIVPVRRGVIQGCPLSPILFNCCLDPLLYAVQRRHFEDGYRFQDKAGQYSIAIQAYADDVLVISPTHEGMQRILNTVDEFQKIAKLKVAPQKCVTLAKTSTAIQPFRIGPDEIPIKTSMDNITYLGIPISGTKTSRFAAATGILEKVKAQIRVVFASHLALSQKIIALRVFILPQLDFYMFHNVFRVNDLKATDQMIRGLIDKEAPTSNIPVSFFYMPKNKGGFGLVKLELRQPQLVLTKFARLWLSQQAETKAFFHTMAQEEKSFRKVVEDQENGFLGIKMENGKIVQKNERSKRTNCFITQAAKAADKLEVRFKEWDKGGIQVRGVGENATDWYRSKHIGQISPLIGRVIQQRQYEEFKKDETHSHTFCEPAALAESHDIMKRPQAVPNNLYSAAIALRTNTAPTPANMHFHNPEVLANCPLCGCQSCTLFHTLNMCRNRFSLYKWRHNIICDDIYQFIHDHYPGVTIKCSARITSDGYQTTGPELDDTVKDLLPDLVVYDEANKMIKIIEVTCPYGTDNNVGNSLDAAYDKKVNKYKSLAEQTERLFNWTTTLSIIVVSSLGVIPLRTKLDALRISPADHIQLLKRLSMHAIAASACIVFEKVPEFFGMRCRPLPGRVTAPNAAIPPNNNENNNDTDHGQENQQATSEEQPTNNGNAQEDNGQGEQINNSTEQTISVDQIIEEDAENNAIEQALDQPDEDEFLN

SEQ ID NO: 1418 - protein, 1734 aa, synthetic construct
  source 1..1734: note = Description of Artificial Sequence: Synthetic polypeptide
  VARIANT 5: note = Any amino acid
  VARIANT 8: note = Any amino acid
  VARIANT 11: note = Any amino acid
  VARIANT 17: note = Any amino acid
  VARIANT 22: note = Any amino acid
  VARIANT 51: note = Any amino acid
  VARIANT 59: note = Any amino acid
  VARIANT 62: note = Any amino acid
  VARIANT 73: note = Any amino acid
MRYHXSNXPAXRTSDNXWRSIXKDVRRPDPSTIEEKSRYNRSIGIPDSLKXRSSAVRSXSSXPPSGPQDVRLXNSPSLDDRRRLVDCETTLGSYREWTDKPMMGKMTYAAVTKRAPPRPQTGGARLSTNLLADEMEIKYRDTNDIRLVIDLPNPHLIKCPLCKSCISARGRGANALKYMKRHIADAHHLNADFVYKCSRCQEHEPENVCGAKWIVNHLKRVHGYTLEDAVSTAKPSTRQQIANAFNDSAPFIDARKTSDVPEKKSREAGLEKFLAPTKSEDTREKTPPSTRKSSESSEASIQSTIQETLSESSDTLTVQEIINISSEDEMDEEPPKRRVNVWALIHENGKDAWIDSDLMVIFLESRARGYESCSIIDPLNFICTDMSYLTTIVRRRMEEGYKKIIFPLCANDHWTLVTITGSTATFYDPMGNEPTETVKKMIDELDLEMQLAPSNSPRQRDSWNCGVFVMKMAEAYIKDTQWDLTDVDTDVKTFRRSLLTELKAKFNIFAEDIQTYRPPSRKALTRNSQSPVVVCHKCSRPATPIQDVSRMEVEEAPVLVPTPEEPPQEWTFVGKNRKRGVTSRTPNTSPEAKRPAFPPVPLKPSANRWHFPEEETEKMEVSSADEVKNSTPPKPPKIPNLLAMKIASPVPLKRGNPSKKHGKGHMMNTARKGPTKKEMPKGEPANLIVKIRSWFDEQLKMYKDEGSNLQRLTWLSDSLTAAIGKAFNGNKYIVDQIIKRNPPPLVEKGAMSTQTSRKRDEFKPRERMAQEPNEPLRIQYAKNRQKTFFKIIGKQSEQCTINIETVEQHFRKTLKAPVVSENAIKTVCGSIKKVLMPKTIEDPISSVEVKSILTKVKDTSPGTDGVKYSNLRWFDPEGERLAKLFEECRKHREIPSHWKEAETILLPKDCSDEEKKKPENWRPIALMATIYKLYSAVWSRRISGVQGVISPCQRGFQSLDGCNESIGILRMCIDTASVLNRNLSCSWLDLTNAFGSVPHELIRRSLESFGYPQSVIQIVTDMYKGATMKVKTADQKTQSIKIEAGVKQGDPISPTLFNICLEGIIRMHQMREKGYDCVGHKVRCLAFADDLAILTNNKDEMQEVIDKLDADCRSVSLIFKPRKCASLTIVRGAVDKYAKIRINGDAIRTMADRDTYRYLGVKTGVGGRASETEALIQVVKELQKVHETDLAPHQKLDILKTFLLPRLQHLYRNATPKLSELREFENVVMKSVKRYHNIPIKGSPVEYVQIPVKKGGLGVLSPRLTCLITFLTSTLCKLWSDDPFISSIHKDALSRITVKAMGLTTQSATIKETCEYLNTRKAVTKGGYSLFCRMNESLRTLSVIQGAPLKSMEFIPVNNEIGIAVQATKDSEIKVFTKADSLKLMSKLKDLVRSAMLKRFLEEKSVKSRVTQVLQHHPQSNRFVRDGRNCSIAAQRFVHPARLNLLSCNANTYDVNHPKGCRRCQADFESQQHILQNCHYSLAGGITQRHDRVMNRILQEIGNGRKAHYKIMVDMETGATRERPDIIMEERDGPEVLLADVTVPYENGVQAVERAWDKKIEKYKHFLDYYRKIGKKATILPLVVGSLGTYWPDTSHSLKMLGLSDGQIRNVIPEICQIALESSKNIYWKHILGDSYKTVEGLFCQRNNKEVRFEGKGEKHHVSQRFQPLKCEKVRTMKSTKEEGRSRSNAKKGPNWRRSKSESDGRSVSKGRYWRDPSNKPPHSKMTQSALAKR

SEQ ID NO: 1419 - protein, 1723 aa, synthetic construct
  source 1..1723: note = Description of Artificial Sequence: Synthetic polypeptide
  VARIANT 255: note = Any amino acid
  VARIANT 658: note = Any amino acid
  VARIANT 1425: note = Any amino acid
  VARIANT 1494: note = Any amino acid
MTNVYLKPVNDNQTNKTGDNSRNTMSNSQCEMTWKPVARTYAQAASTNPADDKTVTVLGCKYNLLKLGNTPQTSKRSPPKPSRGGARISSVYTLTDELEITHREEGKITFAIDLPNKNNILCPLCRECTQTRGRGSSFTKHMKLHVKEKHQLDATFIYKCSMCNEYEPEKKCGTKWIQTHLQKVHNYKYDESAIVVPVPPNTRQQIANELNNAAPFVDIRKPKAAAVEEKKTENGALLKFLTKSNKDDQVKSPSXDIPDAESPEKETQALTIDPKGNNSPSKSSIRSSQSSASSVCQEIQEIITLSEDEDPKGARPKPGINVWSLINETGKDAYIDTDIMMAFLKMRVENCDSVNIIDPLNYQFPARVDLVPLIQRNLEDGKKRVVFPICADEHWTLLTISNGIAAFYDPTGSRMSSYIEELVNELGLIIPKEQDEQPRQRDSYNCGVFVMKMAEAFIQDTEWEMEEVEEDVKNFRRNLLEELKPNYEIFAEKIKYYNSPGKSFAQSRPTSRSSQCAVCPTCSRSATPMMDVGNMEVDPVPQQQETPKSREPEQDEGWKVVGKARKRGVVTERSPNISPEAKRQFTGPEIKVVSPGKFHPLVGETEEMEVTCDSPPTKEPTTEPKVTPSLPAMKIASPEVTKKQTSKKKGKYGKKKQXTKKAQPPKGEPTKKAQPKGEPAKLIEQVRTWFDKQMKSYQEQGSNIQTLTWIADSLTAAIFKANSGNKYLVDKITARCPPPLLNEGEMATQTSRRTEAVKPKDRFVKESNEPLRIQYAKNRAKTFNVIIGKHSARCEIDINVVENHFRQTLKAQPVTEEALNTVCSGIKKAKVDPSIEGPISSGEVKAILAKIKDTSPGTDGVKYSDLKWFDPEGERLALLFDECRQHGKIPSHWKEAETVLLPKDCTEEERKKPENWRPISLMATVYKLYSSVWNRRISSVKGVISDCQRGFQAIDGCNESIGILRMCIDTATVLNRNLSCSWLDLTNAFGSVPHELIRRSLAAFGYPESVINIISDMYNGSSMRVKTAEQKTQNIMIEAGVKQGDPISPTLFNICLEGIIRRHQTRKTGYNCVGNDVRCLAFADDLAILTNNQDEMQDVLNQLDKDCRSVALIFKPKKCASLTIKKGSVDQYARIKIHGMPIRTMSDGDTYKYLGVQTGNGGRASESESLTQIAAELQMVHDTDLAPNQKLDVLKAFILPRLQHMYRNATPKLTELKEFENTVMKSVKMYHNIPIKGSPLEYVQIPVKNGGLGVMSPRFTCLITFLASTLFKLWSDDEYISSIHKKALSRITAKVMGLKTQKATLQEQCEYLNTKKAITKGGYSLFSRMNEAIRTLSVNLGAPLKSMQFIPENGEIALEVQASENSQIKVFSKADSMKLVTKLKDLVKSAMLKNFLENKKVKSKVVQVLQHHPQSNKFVNDGKNXSISSQKFVHPARLSQLVCNGNSYSKDLPKNCRWCGYECESQAHILQHCTYSLSSGITQRHDRVLNRILXEVIKGRKNNDYYDIMVDTEPGPTRERPDIIMIQKDGPEVLLADVTVPYENGVVAIEAAWDWKMEKYSHFIDYFARLGKRAVILPLVVGSLGTYWPDTSNSLRMLGLSDGQIRNLIPDISMIALESSKQIYWRHIFGDSYRIVSDLYCRKDQQEIRFGDEPMENVQVSDRFQPFKTREREKKSEEEKKRRSKSKKGKTWRGSKKQTDSRQSGKSNQNQGFQRSVGQGVSR

SEQ ID NO: 1420 - protein, 2017 aa, synthetic construct
  source 1..2017: note = Description of Artificial Sequence: Synthetic polypeptide
MTKTEWSWRHRSRSRSVGIVVKIDTSDYANVRVHVAADLSNEDGHTSHNNGIILPIPMKPSVDRFCQIQYPPRGYYVPHPQSQKGHDAKPSRHWNEEAQPPYYHNNNHGRRGRSAKPSGRRPPRKPILQEESLAAHPQIPGDTASAVPLYSDVVNNENKSQGKPPQGSHRRSGRPGTKPSVPVGEAEQETNSRPIAPEPIVKFKHDKHGWTTVQGSHSSGRPVPKPSVPVVSEANRFQLLQEGDFPPLTTSESSQEEIKVPNYQRIVSPIPLPSEEDSKLPTKSNYRAPKGRKSRNYKKPQQQNPKKYQQRLPYQPKVNNAPTDRMAPEQLKGGGGKTAHNDIEEMEIEEDTDEKIIQVKRIKIVNKLTPHHFVCMMTYPTDNIYRCFVKGCTATSQGGWGAEDLKYLTVHIRQEHKIKVEWTYECGICGDLSGGAGKHISKWIKPHMRKKHNRDAPTNFKMGSRSSGKPKITELLEESAPSCSNPRRKTLNQKKTAIITQVTPEKLKTGYQTRSVTKALSVLKESRQKELEVLREEEKANAKQKSKLHPFFTKAPHIDGVKPTVRRELSKMITPGGEHKGTKIPMVHTKRGLIQKINRKAKKAKPMHLDESTIIEASQLDVITIDDDDEDDNMTPMRRRFNTWCLDHETTQEAWLTDDVINWYLKDLCFGNEQYMLVDPLVWLIYKMGGMAGVEQRFKSKKTCLFPICEADHWILLVFDETNLCYANSLGSQPNGQVKNFIQQLNRKLCSFEKEVPLQKDSVNCGVHVCLIAKSIVNGQFWYDDSDVRTFRTNAKAALKAQGYELFSEAPKQIENPDSSHREDIKENSMEMCSESLMIVATPQRSEAPMELVDTEPSDLESPKSDRVVYEDCITALSDVSEPRMTPEKSETPEVPVVEERDLDWPKLESPKSDRVVYEDCITDLSDVSEQRMTPEKCETPEAPLVVECVELERLPKDLPVTDRSTVVAIPEAVKLEEKSEVVIPRLMELSYTVPPEPSPVVEYTQPYTHTHTKPKVKATCQMGKKRKVPTGKPDELIQIVRQWFEKEFNDYVTEGRNFQRLEWLTNLLTAAIQKASAGDEETIEKIRKRCPPPEVRENEMSTQTSQRQKPTTTNQKKRSRNTTQSDTQANTYWRNRAKTYNQIIGQDFKQCDIPIAILEEFYKKTTSVTNVPQETLVKVTSRLPRLDIGKWIEDPFTEQEVFGALKKTKDTAPGTDGLRYYHLQWFDPDCKMLSSIYNECQHHLKIPAQWKEAETILLFKSGDESKPDNWRPISLMPTIYKLYSSLWNRRIRTVKGIMSKCQRGFQEREGCNESIGILRSAIDVAKGKRSHLSVAWLDLTNAFGSVPHELIESTLSAYGFPEMVVHIVKDMYKDASIRVKNRTEKSEQIMIKSGVKQGDPISPTLFNMCLETVIRRHLKESSGHKCIDTRIKLLAFADDMAVLAESKEQLQKELTEMDEDCTPLNLIFKPAKCASLIIEFGKVRTHEQIMLKREPIRNLNDDGTYKYLGVHTGADARTSEEELIISVTKEVDLVNRSALTPPQKLDCLKTFTLPKMTYMYANAIPKLTELSAFANMVMRGVKIIHYIPVRGSPLEYIQIPTGKGGLGVPCPRITALITFLVSTMKKLWSDDEYIRKLYNSYLKKVVEAETGIVEVSTKDLAEYLSNKVPSRKHEFGYNCYSRIREVCNGLALNQAAPLYKLEFIEQDNELAVVVQPTEESKERIFTKDHVKKLQSLLKASVNDALLHRFLTTKPVKSEVVQVLQQHPQSNSFVRMGGKVSISVHVWIHRSRLNQLTCNYNIFDPKQPKNCRRCGYKNETQWHILQDCTYGWAKLIRERHDAVHHKVVTMICAGAKKNWGRKIDQELPGFTSLRPDICLTSPDGKEVIFADVCVPYSRTRNIEFAWKEKIRKYTEGYSHLVAQGIKVTVLPIAIGSLGTWWTPTNESLYQLGISKSDIRSAIPLLCSTVMEYSKNAYWNHIYGNSYTSVPLRYGHQKPDGDDWKKELSCEPVLALQQ

SEQ ID NO: 1421 - protein, 1560 aa, synthetic construct
  source 1..1560: note = Description of Artificial Sequence: Synthetic polypeptide
  VARIANT 326: note = Any amino acid
  VARIANT 367: note = Any amino acid
  VARIANT 588: note = Any amino acid
  VARIANT 755: note = Any amino acid
  VARIANT 909: note = Any amino acid
  VARIANT 1171: note = Any amino acid
  VARIANT 1315: note = Any amino acid
  VARIANT 1389: note = Any amino acid
MNVDLDATIKSIGMNTKETTYPNSQLRVETTPCTSTTIMHASCNTTSTISYSPLPSAVSLPESPASSITITTTDDNCDIIETPYPLPQTNGDLSEILKDIEANKDTTMSNKVLDCDSDSGDDRDMIIENDRESDMDLFSQSLLNTNQSDERREKNLTENAPTEITTEKSYFDIISKASDNTTSKKLLNVKNELTAGLPPMPPVTNTAKFIRNVRPEDIADPTLYRLDSRGKLGCRTQYKKPGCGDIAVYDYEAIVEHAAFIHTIPFNEQNNVDCQPCHPKKGKDVHTIVLIKYADIFNHIEAHSHVVQTAITDNMKTYLRLTKENXFYCSYRNNKKKNKCKKAFNLESNMMDITEHMKTHTGYSFDXNLNILCYCGIWKPFTELIAHIKTEHLQEYINSIPNKENIHNTTTIVSPLNFAGILASGETQNIPDEEIIKPRDLPENLAFNRNIENELSWSQHLVKAYIFSYAVKTSTIFINPYTCNALIQCNYKTFFETFPFKDFAKWNEIVLPIHNNTSSWSFFFLNKKKRVAMIIDPTADDSHTLHFELATDILRTILNVQNIFEDLNFPLTEVEYPVCHEANLSAFXVCHFLKCLMSDLPIDIPDIDHMKETMRPIIRKYNCAKFPESDVRNYRVLIEDLIYQLNLDTITCEEILCEIERINGRLNPKRYFKESKPKTDIIHLQKKKSAELLCVKRLKFQISQKTEIGKIWENDDVDHRPPMARFLKTFASQDCPVSNTSSINLPYYMDTDTDXCTDCENLSHIMKNLDSSAPGMDLITGGDWKKISPKHELITAICNCILRNKVCPEKWKLFRTVLILKPGKMSESFRANSWRPLAIMDTAYRIFTTLLNNRLLQWIRNGNLISPNQKAIGIPDGCAEHNATLHFAIDRAKRCKTELHIVWLDIADXFGSLPHDLIWYTLANMGLKNETLTLIKELYKDVKTIFDCQGTLSEPVPITKGVKQGCPLSMTLFCLSIDYILKSILTNYPFLLHDLNISILAYADDLVLLSDSYLEIKKSLESTVELAAFANLKFKPSKSGYLSINNVNSDILKLHLYNEEIPTISENNKYRYLGVDFSYKRNQDVDGRLGSALALTRSLFKSYLHPAQKLNAYKTFIHSKLIFSLRNCVIGHRILDCDRNRVTQGREKQLGFDQEIKALLKTMIGDKFQAXNNYFPYTHCKLGGLGITSAIDEYLIQSITGITRLFHSSNLSFRKMLITELAHSRGGKNFEAGLKWLNCEVNKAFPNTSFFVKFQKSALALKRKFCICVNLKFVEDNFSLEMTYKKRTSYVNHQNLSTLSKELHDFVGLYYAEQXCQMRVQGHIATAIGDSITAKYLIASDILNDAQYYFLVRARNNLLNLNYNAYRLKYNIGTKCRLCHLDEETQAHXFNHCRAKPNARRVKHENVLVSIVAFLEKIGFEIDVEKSPKYISIPTKLKPDMVIRSKRNKDIHVLDLKVPYDSGEGFEKAREDNYVKYKDLAIEIGKAFNQKATISAVVIGCLGTWDKKNNAALSKIGLTKTEIISLARIACPNAVIACYHIYREHVSFTKSAMALPFSLA

SEQ ID NO: 1422 - protein, 1171 aa, synthetic construct
  source 1..1171: note = Description of Artificial Sequence: Synthetic polypeptide
TTGRNLGQWSCYSRSIQQSNYSFKLSSTEVGELVEQSPAPLQSPQFSNNYNNLNINNNLYYSLNTFNQSNNLCCLVNIEFFPTQHLLGDIVNSGCINYMNNYNNFDNINLYINSNVLSYNNYNHSFLASPYTTNITEHADINMHVQEVNMQQDNNTQHAITQQVSLQATSLQHTLDEMIVQFNTAVRLKKKHKVAKIFRGHNHRKDLPTLPAREQYKTKPKLAIREVLHRKTTATSSPSENAIKAFFSSYSRPAELFTGQELLESSWFPVHPEDDFEFRIPGRDQIAKYIKFASKSAAGLDWITYEDIKLGDPSGEILQPIFEYIVQNNICPSEGKASRTIMIPKPGKSDYSDPSSWRPITITSAVYRLLMKYLTWELYNWILLNQMLSRSQKSLGKFEGCHDHNAMLNMLIQDVRRQTNPSNPINKNKRLYIVFLDFTNAFGSVPLDTLMYVPQRFGLGTSALTLIKNLYLDNYTNVTCGESKIENVKLNKGVKQGCPLSMLLFNIFINIIIRAIEAMPDVHGYPLGDMDIRILAYADDIALISDSHKDLQEMVYKAEYIGRILGLLFNPSKCALMDIPHDKKRTPPILVNGEMIKCVGKADPYKYLGTFRSWFRKLDIKELLQMMMDETKLITESNLHPHQKIHAYETFIHSQLPFHLRHSRIPFSDFITNRKTNKTTNNSNDSEKSIQKAYDPESGQLFLNTFALPSGCAKDFFYITKDAGGPQLTSGLDEYLIQSIMYIFRLLGSEDPTLNSAIKHDLISHLNLKGFVNINFSQAISIFNSNFTDRTDHFSHLSRTEWARLQLARKKLKSTLAIQTNVCLINGHLVLTLSLENNVLLIDSKEKGDVKKIHASLMGFLRLAHLIRLQKHGWSKLLFSATTHHEILNKRILNGHVPYKIWYFIHRARLGLLPTKLFSVSNLCRKCGGKKETMSHALVNCPMMQTLINERHDALEISLVQILSSKFQGTVIRQKTYVNELRPDITMESDTQYYLVEVKCPFDTKMSFELRTQQTTDKYNIIIEILEDVHPGKEVRLVTFIVGTLGSWGPQNSDFLRDLGFSKDEIDQVKTRLMLQNINSSCEQWKRFVQYAPTITPGPIPDAESEDDQGTSDNGPTAATVQGPVIGDEEEELQIYDSGLDESSDDEPDPDDAELLFTIDIEQYLNSVITD

SEQ ID NO: 1423 - protein, 1591 aa, synthetic construct
  source 1..1591: note = Description of Artificial Sequence: Synthetic polypeptide
  VARIANT 6: note = Any amino acid
  VARIANT 16: note = Any amino acid
  VARIANT 23: note = Any amino acid
  VARIANT 25: note = Any amino acid
  VARIANT 26: note = Any amino acid
  VARIANT 34: note = Any amino acid
  VARIANT 35: note = Any amino acid
  VARIANT 37: note = Any amino acid
  VARIANT 38: note = Any amino acid
  VARIANT 40: note = Any amino acid
  VARIANT 41: note = Any amino acid
  VARIANT 54: note = Any amino acid
  VARIANT 59: note = Any amino acid
  VARIANT 68: note = Any amino acid
  VARIANT 72: note = Any amino acid
  VARIANT 76: note = Any amino acid
  VARIANT 78: note = Any amino acid
  VARIANT 79: note = Any amino acid
  VARIANT 81: note = Any amino acid
  VARIANT 90: note = Any amino acid
  VARIANT 93: note = Any amino acid
  VARIANT 108: note = Any amino acid
  VARIANT 111: note = Any amino acid
  VARIANT 112: note = Any amino acid
  VARIANT 125: note = Any amino acid
  VARIANT 178: note = Any amino acid
  VARIANT 241: note = Any amino acid
  VARIANT 243: note = Any amino acid
  VARIANT 279: note = Any amino acid
  VARIANT 311: note = Any amino acid
  VARIANT 324: note = Any amino acid
  VARIANT 364: note = Any amino acid
  VARIANT 366: note = Any amino acid
  VARIANT 408: note = Any amino acid
  VARIANT 478: note = Any amino acid
MESPAXIFEKIDAALXIYSAAAXLXXNSLSLSPXXAXXSXXAAPASSTPQKTQXKPIPXTTLGASRKXRTTXKDEXIXXWXKKAPVDTSXGRXSTRRTALRDLTSRSXNIXXALQEEDPRRTPPXSRDQDAERRPAAPEKAATRGAPPTIQDQDADRCPAGRDATGGAPRRPRTRMLXAAPLGRMPPEEPPPTTRDQDADRRPAAPERDAPEGTTSSTPDPETTYHPPVRRRAAPRGTHSXAXDLDAARCPSGQRDIVASESSTPPGATSPPQASLPDXEESPAESAGTTEVRPTEGEAGEDDCIYLQYPXPTGLLLCPFCLPXHGVQTLGALSKHVRKAHNKRIAFRCSRCDAPFETQKKCKXHXATCKGPLTTAKVNPTDTLRVPTPTPTDGPASAPQPASPEPQXVRGDQPPTEGSATPASRTDDATKRTSPASRIPTLDPAVRGITATSQVSDLTRCLSDLIKTIRHNTDTRRXSAPPQVTSCRPAVGATSTAPQAARRDPANGGASRSPQIPRPDPAPGRPNTSSKVTQRDSDRQKPHAPPRTPQPDTTRRRTRTIPSASKHDRAPTKPNTGVSRTPLPPGRSSAASETPRAAPPPPHQDPRLKTHLNTAPQSEGQQGHRLSPQHLNPRRQRSRRNDGREQRVATPWQSAWMEELAKAEDFETFDTLMDRLTAELSAEITARRREPQEASRATRRFPAPTRNNTAREGRRGDVGRRYDPAAASRIQKLYRTNRTKAMREILDGTSSYCAIQPERLYSYFKDVFDHEAQTNLQRPECLLPLPRINLTEDLERDFSPQEVQARLMRTKNTAPGKDGIRYHLLKKRDPGCLVLAAIFTKCKQFHRVPRSWKKSMTVLIHKKGERDDPGNWRPISLCSTIYKLYASCLAARITDWSVCGGAVSSVQKGFMSCEGCYEHNFLLQTAIQEARRSKRQCAVAWLDLTNAFGSIPHHHIFATLGEFGMPETFIQILRDLYKDCTTTIRATDGETDAIPIRRGVKQGCPLSPIIFNLAMEPLIRAISSGPTGFDLHGKKISILAYADDLALVADSSESLQQMLDVTSQAAEWMGLRFNPKKCASLHVDGGARALVRPSRFLIQGEPMASLEEGEVYQHLGTPTGVRVRQTPEDTIAEILRDAAQIDSSLLAPWQKINALNTFLIPRISFVLRGSAVAKVPLNKADSTIRQLVKKWLYLPQRASTDIIYISHRQGGANVPRMGDLCDVAVMTHAFRLLTCPDPTVRSIAQEAVRDVVRKRIARAPSEQDIATYLSGSLEAEFGREGGDLSSLWSRARNASRRLGKRIGCCWKWCEERRELGILVPRIKTPDHTIVTPTARAMLERTLKDAIRCHYAENLKRKPDQGKVFEVSSKWDASNHFLPGGSFTRFADWRFVHRARLNCVPLNGAIRHGNRDKRCRKCGYANETLPHVLCGCKQHSGAWRHRHNAIQNRLVKAIPPSLGKITLDSAIPGTDSRLRPDIVVTDAEKKKVLMVDVTVPFENRSPAFHEARARKALKYTPLAETLRAQGYEVQIHALIVGALGSWDPHNEPVLRACGVGRRYARLMRQLMVSDTIRWSRDIYTEHITGHRQYHTE

SEQ ID NO: 1424 - protein, 1352 aa, synthetic construct
  source 1..1352: note = Description of Artificial Sequence: Synthetic polypeptide
MAAKSVACPHDGCANKYASEASLRRHIKNKHATDEEGDETSHSCPHCHRPFSTARGLSVHIGKSHRQAPPEPTRPPPAPAPADPGLDPDPGPTVTPPSRDDEDREEPDDDPVEIADLSCPHCAQALPSAHGLANHLRACKDHRVPAPGAPRSGPPSSRYWTAVEHHRYVEAMARFADHPDLLARAAAHIGTRTYKQVDSHRTKVIAAEREGRPVRTLDPTMDWRMRPYCASTTARWLAEQGRSPVAPRSPCPEPHAPPPAAALLYIPATPPAPTPRAPVAPPKLAPPAESTVPATPDGNPEAPAPPFSAPGPPTPKALPPPPPSRRNLRPHLVPKDAWQGVADAVAPAASRLLRTPLAHLSTEQWATFEAALAGLEATLHHAARSAEAVPTRCASRAREDAERQLREARKTREIFGKAAALYAAGKDPTATIERIPPEVRLHLPTPGSAEWPARAAAARRVIRRAVARADRLRKRMGILDSDRDLQRLFNANQKKAVRQILAPSTKAPRCQLDPAAVEEAYIQTLAKPPPIDPSPPWKNSVQWPRPPTAADDGGSPFSVAEVRAQLRRLPNGSAPGIDGIPYEAYKRTKLDATLAHVFEVVRLNARLPARWDVARTVLLYKKGDPNDTGNWRPISLQVTIYKIFTAALSKRLISWAGKHNTFSASQKGFLPAEGCHEHAFVLRSVLDDARRHKQNVYLAWYDLRNAFGSVSHDLIAWCAAMLGLPRYLRDAIGAIYRHSALFVQVGDQETTGVIPMRCGVKQGCPLSPLLFNLCVEPALRCLRRTTGYKFYGTSITVEGQAYADDLLTAAPSAYHAARQVATIEEWANWAGVSFVVQALSLDAPAGKCAALAINFEGGLMHSIDPALKVQGAAIPAMSRNNVYRYLGVHVGLTDALGQANELLEKASRDARTICASGLEPWQKVVAIKTFILSRLPFFFHNGKIQRGRCQQFDRELRENLRAALRLPVCTTNAFFHSRVASGGLGILPIAEEQQVYLAAHVFKLLTSPDLSIRAIARHQLAEVTHARHTTPVQDGEASPFFGWLMRGQEVASTTPSGDVSSIWFAAAGAYSRMGWSVRDALHPTLTVGPGVQFEGRFQRANVIPALRASAFSRHAVEWSALRTQGRAAAYQHAVHPATHHWVHNSAGLTTKEYRFAIKCRLGLLPTRAAPHHRNGPTACRACSYARETANHVLGHCPATKAEVIARHNRICRALAQAAEASWTSVLEDVPIPGVDSPLRPDIYCSRPGQCAIIEVAVSYEDAFNASMEGRAKQKTDKYAGLAATVEEQLRLQTRHAAFVVGFSGVVLPASVTATATSLDLPPKTWNVLLKRCVAASIKGSYTAWRRFRRSTP

SEQ ID NO: 1425 - protein, 2004 aa, synthetic construct
  source 1..2004: note = Description of Artificial Sequence: Synthetic polypeptide
  VARIANT 148: note = Any amino acid
  VARIANT 324: note = Any amino acid
  VARIANT 759: note = Any amino acid
  VARIANT 912: note = Any amino acid
  VARIANT 1400: note = Any amino acid
VCSVRGCRREDSRRFYKFKFPLNFVKVPKTIVIGSAFQKSSVSARSQNHSRSTRVPKTRQPRTSNTIGRYTAASANNYLTVIITGNYTVFAQWICYRECTWLLSKFVNFFLTIIGYFFQLRLVVIYEGPVILDTFSNCGSSLFMRGQXSKALLVRLNRSALAMADPQVHYIDYPLPPRVKCVKCFGAEGAGKVKGEYSDPPHLAKHLKKCHPGDTLNYKCSICDLRGTGKYPLRDVKAHYAECHVSPAVDAAGPSTRGSLGECSGAGQPTASRAAKATTRLAETVGGTDKRRAATSGSRQLTLPFAATPSPSTAAGEARAPRSXSTTPTSRSPSYAAVTAGPPSMRSTTTSTTARSKTVAKGAAPNTTTTTTARRSGEAAATRKPPTTATVSKPRVLSVETVRLPVDDIQRAGVQNAAKPARAPSRPPQRTSPEAGGPRTTGAKEKCGEGAYKKLPANSGNPISTRTRRATSVPVEKSEGTARRERVSPHPPPKGIDIILSSTSEEEGTPYQPGGVGRLRLRRKKVTGPPPKMTPREGVVTRARRSTSAPVEKSALDARLTALDRTSSRATGNPTSQIAGGLYTSRGQPERTPPARLPSLSPTTRGSPSGSLGEIRTPISPATSLPATLTTCTVTTTTCGSPITSTGFTGGVGRLITPPSLPQTNILPTIGEEGTSPCVAVVTTHPRPTGEDAPCEAPQPVSDHQRQSIGEPRRDTDTHLACDVATGNAHHLHGDDDHLWKPHNIHGLHRWRGEADNTXEPPPNEHPPDHRGGRNVTVRGGRHHPSLGGRSTSPLILPRPTTPEPERGQEERRLEGAAQPPTTPVVEGDNQWDGQWTVSVRRRARRQQLNDTSPSNSESPPTAGPSRSPRIAPLSALIAASTSRHETSLNLNCTNGNICMDRTPPRNILPVXAERRRETSPQDRVEGDIGYGAGKVSAEHPSAPVNVRGVMSRGRATASSIVPPRANRGEGGRQHHSRRRPDAPVGQPSRDHPAPATVARQRRRERVAARDALLDRAKDVATIADLEAFAASVAAFFGEDASATGAAARARDRSVRSREAGARRGVKGGERPEREGAGRPGSAPADPGASGEARGDWVREAKRLQALYRANRRKAVREVLQGPADQCQVPKRQVQEYFERLYSGGEDLAGAGVEAERPDPSSPREVSAVLGPLAEREVDRRLRRMNNSAPGPDGVSYRDLRGADRGARLLTALYNICLRLEAVPASWKTSNTVLIHKKGDRGMLENWRPLALGDTVPKLFAALLADRLTDWAVTRGKLCSAQKGFLRDEGCYEHNFVLQEVLTHAKRSKRQAVVAWLDLSNAFGSIPHATIRRALIRSAVPRGLIAIWDSMYDGCTTRVRTAEGHTAPIPIRSGVRQGCPLSPIIFNLAIDSVVRVAAEXNDGYSLHGNTWSALAYADDIALLAQTPEGMERMLASVEAEAASVGLRFNPAKCATLHVGAGNGGRVLPTSFQIQGETINPLAQGESYTHLGVPTGFSVDQTPYAAVGDIVSDLRAVDRSLLAPWQKIEMLGTFILSRLDFLLRGARVFKGPLTAVDLNIRRHVKSWLNLPQRASAEGVYMPPRWGGCGLLPLSDLADVLTVAHAYRMLTVRDGAVRELAWESLRGVVGRRIGHAPSCEDIASFLSGSLDGRMRGGGEASLWSSARNAALRQSERLSLRWRWVEATEEMTLECRGPRGAAIKIPPEARGQVVNRLRSAVAEHYASRLLSKPDQGKVFEVSSRSRVSNHFIRGGSFTRFADWRFIHKARLDVLPLNGARRWEANDKRCRRCGEVSETLPHVLCHCGIHSAAIQLRHDAVLHRLWKATRLPGVVRVNQRVEGVSDELGALRPDLVVRHEPSKSVVICDVTVPFENRWTAFEDARARKIAKYSPLAEELQRRGYRVVVTAFVVGALGSWDPRNEAVLRLLRVGNQYAAMMRRLIVSDTIRWSRDIYVEHVSGTRQYLAPSRPSGDLATPPRAVRRRWLAEERSAQDAARRGSDSVSVA

SEQ ID NO: 1426 - protein, 1019 aa, synthetic construct
  source 1..1019: note = Description of Artificial Sequence: Synthetic polypeptide
  VARIANT 52: note = Any amino acid
  VARIANT 652: note = Any amino acid
CHHAGLRPGTPNRTRRPDQTAPLPDPRGHPMPPNRRGSRSRPEEPSRREPPXPRACQGLRVWSPPQQRMPTPWQTLWLEELSRATTFKAFEASVARLTEELSAAARPGQPRGGNNRPATRRDHRLQPQRRPRRQRYDPAAASRIQKLYRANRPKAVREILEGPSAFCQVPRETLFNYFSRVFNPPAEAAAPRPATVEALTPVPPAEGFEDAFTPQEVEARLKRTRDTAPGRDGIRYSLLKKRDPGCLVLSVLFNRCREFRRTPTTWKRAMTVLIHKKGDPTDPGNWRPIALCSTVAKLYASCLAARITDWAVTGGAVSRSQKGFMSTEGCYEHNFTLQMALDNARRTRKQCAVAWLDISNAFGSVPHRHIFGTLRELGLPDGVIDLVRELYHGCTTTVRATDGETAEIPIRSGVRQGCPLSPIIFNLAMEPLLRAVAGGPGGLDLYGQKLSVLAYADDLVLLAPDATQLQQMLDVTSEAARWMGLRFNVAKCASLHIDGRQKSRVLDSTLTIQGQAMRHLRDGEAYCHLGTPTGHRAKQTPEETINGIVQDAHKLDSSLLAPWQKIDAVNTFLIPRVAFVLRGSAVPKTPLKKADAEIRRLLKKWLHLPLRASNEVLHIPYRQGGANVPRMGDLCDIAVVTHAFRLLTCPDXTVSIIAASALEETARKRIGRQPTRRDLATFLSGSLEGEFSRDGGDFASLWSRARNATRRLGKRIGCAWTWTEERRELGVSLQPAPHADRVTVTPRTRTFLERFLKDAVRNKYAGDLRAKPDQGKVFDVTSKWDSSNHFMPSGSFTRFADWRFLHRARLNCLPLNGAVRFGHRDKRCRRCGYVAETLPHVLCSCKPHARAWQLCHNAVQDRLVRAIPAAAGEISVNRTVPGCESQMRPDIVITNEEAKKVVIVDVTIPFENRRQAFTDARARKREKYAPLADILRGRGYDVTVDALIVGTLGAWDPSNESVLHACRVSRRYAKLMRCLMVSDTIRWSRDIYVEHITGHRQYTDPTRRTAAGPDPEGTA

SEQ ID NO: 1427 - protein, 1584 aa, synthetic construct
  source 1..1584: note = Description of Artificial Sequence: Synthetic polypeptide
  VARIANT 117: note = Any amino acid
  VARIANT 118: note = Any amino acid
  VARIANT 121: note = Any amino acid
  VARIANT 139: note = Any amino acid
  VARIANT 141: note = Any amino acid
  VARIANT 278: note = Any amino acid
  VARIANT 328: note = Any amino acid
  VARIANT 409: note = Any amino acid
  VARIANT 490: note = Any amino acid
  VARIANT 529: note = Any amino acid
  VARIANT 688: note = Any amino acid
MTTKKVLGASTTLQTSSTKGKNSGCSKDPLRDAVPGRSWILRPACRDITTRRNIPPAPQQQQPPMESPPTLQLQDALRRPSPTPAAAQVADAGGALAALHTIKRGISVDWTSISPKXXQRXTSASPDACPASETTQRDXRXLLDARPAGPLDPTRPHQDEPASDTADAAGTPLLQGNEDTIYLQYPLAADMLICPICSPPQSFHLLGVVTRHLKRCHSKRVAFSCALCSLPFETQKQCKMHQVACRKCLKGTTQSPAPAPSPPAARRPAAPEPQRRKXTSQAAVKKPAPVARPAERDAAIEKVPAASGNITQVLASRRPVSPSHVAKXISMLRRLSAASPPVQHVPVPRRISAPPRIAARDPVAGRASAAPQTALRTPAAGGASTTPQTALRTPTAGGASAMPQTTLPXPRRPDWRNQPRSHSKAPGLHRQTDQHGPQVHSAGHCLREISRSSSNRLGSSHSAAATHRRTGGVPATPEPDRVSPTTSNAXIPPEIPPQHPTEGNPDPRDRRQADHTAGSEPAPDEVEDXEGQRPMVRAATPWQTAWTEELQAAASFDDFDLLVDRLTRELSAEIAPRRSSNQENAPPAHRTPAPNHNTTTRGARSRDASRRYDPAAASRIQKLYRANRSKAMREILDGPSPYCTIPSERLYSYFKDVFDRIARNDAQRPECLRPLPRVDEAGVLETDXTPKEVMARLSKTKNTAPGKDGIPYSLLKKRDPGCLVLATLFNQCKRFCRTPSSWKKAMTVLVYKKGERDDPSNWRPISLCSTMYKLYASCLASRITEWSVSGGAISSIQKGFMSCEGCYEHNFVLQTTIETARRARRQCAVAWLDLANAFGSMPHHHIFATLQEFGMPENFLRVIREVYEGCSTTIRSVEGETAEIPIRSGVKQGCPLSPIIFNLAMEPLLRAISNGTDGFNLHGERVSVLAYADDLVLTADDPESLQGMLDATSRAADWMGLRFNAKKCATLHIDGSKRDSVQTTGFQIQGEPVIPLAEGQAYQHLGTPTGFRVRQTPEDTIQEILQDAAKIDASLLAPWQKINALNTFLIPRISFVLRGSAVAKVPLNKADKIVRQLVKKWLFLPQRASNELVYIAHRHGGANVPRMGDLCDIAVITHAFRLLTCPDAMVRNIAANALHDATKKRIGRAPSNQDIATFLSGSLDGEFGRDGRDIASLWSRARNATRRLGKRIGCRWEWCEERQELGVLVPQIRSNDNTIVTPSARGMLERTLKAAIHSLYVETLKRKPDQGKAFELTSKWDASQPLPRRGRLHPFRRLAVHPPCPAQLRPAQRSRPPREPRQALQEVRLLQRDPAPRPVQLQAPLQSLAAAPQCHPEPPGESHRTAPGGGRRELRHPRYPASGTPANHFLAGGGFTRFADWRFIHRARLNCVPLNGAVRHGNRDKRCRKCGYSNETLPHVLCSCKPHSRAWQLRHNAIQNRLVKAIAPRLGEVAVNCAIPGTDSQLRPDVVVTDEAQKKIILVDVTVSFENRTPAFREARARKLEKYAPLADTLRAKGYEVQMDALIVGALGAWDPCNERVLRTCGIGRRYARLMRRLMVSDTIRWSRDIYIEHITGHRQYQEV

SEQ ID NO: 1428 - protein, 1420 aa, synthetic construct
  source 1..1420: note = Description of Artificial Sequence: Synthetic polypeptide
  VARIANT 694: note = Any amino acid
MTQDQDADCCPAGKDATRGAPPMTQDQDADRCPAAPERDAPEGTTSSTPDPKTTYHPAVRRRAARRGMHLRAQDLDAARCPSGQRDNVASESSAPPRATSPPQASLPDPEESPGESAGTTEIRPTEGEAGEEDRIYLQYPLPTGLLLCPFCLPVHGVQTLAALSKHVRKTYNKRIAFRCSRCDLPFETQKKCKFHQATCRGPPTTAKVNPTDILRVPTLTPTDDLASAPQPASPESQQIRGDQPPTEGSVTPASRTDDATKRTSPVSRIPTLDPAVRGTTATSQVNNLTRRLSDLIKTIRHNTDTRRCSAPPQVTSCRPAVGATSIVPQAARRDPANGGASRSPQIPQPDPAPGRPNTSSKVTQRASDRQKPHAPPRTHQPDAARRRTRTIPSASKHDRAPTKPSTGASRTPLPPGRSSAASETPRAALPTTPGPPPQDPPEHRSTVRGTTRPQTVPAAPEPAETTQQEERRPRARVATPWQSAWMEELAKAEDFENFDTLMDRLTAELSAEITARRREPQEAARATRRFPAPSRNNTAREGRRGDVGRRYDPAAASRIQKLYRMNRTKAMREILDGTSSYCAIQPERLYSYFKDVFDHEAQTNLRRPECLSPLPRIDLTEDLERDFSPQEVQARLSRTKNTAPGKDGIRYPLLKKRDPGCLVLAAIFNKCKQFHRVPRSWKKSMTVLIHKKGXRDDPGNWRPISLCSTIYKLYASCLAARITDWSVCGGAVSSVQKGFMSCEGCYEHNFLLQTAIQEARRSKRQCAVAWLDLTNAFGSIPHHHIFATLGEFGMPETFIQILRDLYKDCTTTIRATDGETDAIPIRRGVKQGCPLSPIIFNLAMEPLIRAISSGPTGFDLHGKKLSILAYADDLVLTADDPESLQGMLDATSRATDWMGLRFNAKKCATLHIDGSKRDSVQTTGFQIQGEPVIPLAEGQAYQHLGTPTGFRVRQTPEDTIQEILQDAAKIDASLLAPWQKINALNTFLIPRISFTLRGSAVAKVPLNKADKIIRKLVKKWLFLPQRASNELVYIAHRHGGANVPRMGDLCDVAVITHAFRLLTCPDATVRNIAANALRDATEKRIGRAPSNQDIATFLSGSLDGEFGRDGRDIASLWSRTRNATRRLGKRIGCRWEWCEERQELGIRVPQIRSDDNTIVTPTARGLLERTLKAAIRSLYVETLKRKPDQGKAFELTSKWDASNHFLDGGGFTRFADWRFIHRARLNCVPLNGAVRHGNRDKRCRKCGYPNETLPHVLCSCKPHSRAWQLRHNAIQNRLVKAIAPRLGEISVNCTIAGTDSQLRPDVVVTDEAQKKIILVDVTVSFENRTPAFREARARKLEKYAPLADTLRAKGYEVQMDALIVGALGAWDPCNERVLRTCGIGRRYARLMRRLMVSDAIRWSRDIYIEHITGHRQYQEA

SEQ ID NO: 1429 - protein, 1081 aa, synthetic construct
  source 1..1081: note = Description of Artificial Sequence: Synthetic polypeptide
YAPGYEAAQSPCGREPPRDHHRRPRDACGSSHSPEPCLTTPRLLPETVSAEPCDDESQRTRYASPHKQARTLHDAEPRDASREHAPSCAEPRCHRCQWTHWKDCCPHSTNTTDGPEGTDRCADTITSPATAACPQRSPCPLGSSNGCDETAPEKRQPAADLVHTAPFAVLVRAGPFADLVRAGPFADHHQDDDPLPHRSGSLGPLCSKQKDPRKTHQHRHSGQAGNQTHTDIPRAAPSRRAAICLMANAAATREDLLRAATSLSEMAAANQPTRSPTGGGEPTSQGRRGPQALADAAKRIQQIYRTNIPRAMRKVLRTLLTAVFSACLRTGHVPDLCKKSRTVLIHKKGDRTDLSNWRPLSMGDTIPKLFAAVMADRLTAFLTNGGRLSEEQKGFLQHEGCHEHNFVLGQVLEESRRQGKDLVMGWLDLSNAFGSIPHATIMDAVAGMGIPSRIRTIIHQLATGAATTAKTIDGMSEEIPIEAGVRQGCPASPILFNIAIERVLRKIKTVNAGYLLYGSRISPLAYADDLVLIASSPEEMRSLLRAADDAAIEAGLHFNPKKCATLHLTGKKSSRRAVQTGFLVRGTPIPAMTEGDAYEYLGIPLGLKKNQTPRAAMEAIVGDIAKIDDSLLAPWQKIDAARTFVAPKLDFVLRSGATLRAPLRHLDTVIKKHIKKWLYLPQRASAEVVYTPLKKGGAGILPSSILADVLTIAQAHRMVSCPGEVVSRIASEGLREAVKRKINREPSGDEMAHFLSGSTLSGETASFGDAGFWSRVRMATKRQAVHLGVRWAWRGGELLVESRGQRNRPVATDSNSRSQLIQRLRCAAQDEFLTILINKPDQGKVAKLSTLTPVSNAFIRDGSFTRFADWRFIHRARLGVLPLNGAIRWGSGDKRCRVCGYQLESVPHVLCHCMHHSNAMQQRHNAVMDRLAKAGSRLGTPRVNCRVEGVAEDMAALRPDLVWRDERSRKIVIVDVTVPFENGAEAFDNARGEKEEKYRPLAEALRAMGYQVKLEAFIVGALGSWDPKNERVLKTLGVSRFYAGLMRRLMVADTIRWSRDIYVEHVSGIRQFTLPSGAPSN

SEQ ID NO: 1430 - protein, 1258 aa, synthetic construct
  source 1..1258: note = Description of Artificial Sequence: Synthetic polypeptide
MSGPRQAAADPRPSTDPRRQRDSQSPEPRLTRAASRRRTPDPEDAPRTTAEHPERRRTPPDPRGPSATTAGPERRRPPDPGGPEDDPPEGLPTLVEEPRTPPTPDPPDGRPRRGCRRGSAHVPPLPPPCEAAVPDLPPAKAVQVAQRHEQTPTALPPAAPSVLLLPLRHRVRGPEAPEEPPQGMPGPRGREETRHAGEVRRPTTRAAARRPARPAAPPATPPDQTSGDRPTERPAPATPPRRSAPRDPRPDVTPRPDGPPPGPPGPPDAPDPPRIPEPPGEPEPPGALQLPSVPGSPGAETSAQQRMPTPRQALWLEELSRATAFEAFEASVARLTEELSAAARPGQPRRGADNGPTTRRDHRPQPQRRPRRQRYDPAAASRIQKLYRANRPKAAREILEGPSAFCQVPRETLFNYFSRVFNPPAEAAAPRPATVEALTPVPPAEGFEEAFTPREVEARLKRTRDTAPGRDGIRYGLLKKRDPGCLVLSVLFNRCREFRRTPAAWKRAMTVLIHKKGDPTDPGNWRPIALCSTVAKLYASCLAARITDWAVTGGAVSRSQKGFMSTEGCYEHNFTLQMALDNARRTRKQCAVAWLDISNAFGSVPHRRIFGTLRELGLPDGVIDLVRELYHGCTTTVRATDGETAEIPIRSGVRQGCPLSPIIFNLAMEPLLRAVAGGPGGLDLYGQKLSVLAYADDLVLLAPDATQLQQMLDVTSEAARWMGLRFNVAKCASLHIDGRQKSRVLDSTLTIQGQAMRHLRDGEAYCHLGTPTGHRAKQTPEETINGIVQDAHKLDSSLLAPWQKIDAANTFLIPRVAFVLRGSAVPKTPLKKADAEIRRLLKKWLHLPLRASNEVLHIPYRQGGANVPRMGDLCDIAVVTHAFRLLTCPDATVSIIAASALEETARKRIARQPTGRDLATFLSGSLEGEFGRDGGDFASLWSRARNATRRLGKRIGCAWTWTEECRELGVSLQPAPHADRVTVTPRTRTFLERFLKDAVRNKYAGDLRAKPDQGKVFDVTSKWDASNHFMPSGSFTRFADWRFLHRARLNCLPLNGAVRFGHRDKRCRRCGYAAETLPHVLCSCKPHARAWQLRHNAVQDRLVRAIPAAAGEISVNRTVPGCESQMRPDIVITNEEAKKVVIVDVTIPFENRRQAFTDARARKREKYAPLADTLRGRGYDVTVDALIVGTLGAWDPSNESVLRACRVSRRYAKLMRCLMVSDTIRWSRDIYVEHITGHRQYSDPTRRAAAGPDPEGTA

SEQ ID NO: 1431 - protein, 1241 aa, synthetic construct
  source 1..1241: note = Description of Artificial Sequence: Synthetic polypeptide
MSCPREGSDHLGPDPETPALHQGSDIRVTSSRLRGSRGKSSRQPSSRHQVPASEASATAQQTAANECQVCGSSFATSSGLRRHMARLHRAASADPEGAAPASITEIFDYPLPSRWKCSACSENFFNQQTLKRHQTRHHPATTFAYAFRCSSCRSEFDSARRAANHWQVHKKERSQLSGTEPQASSQARVSMAHSPPPLPNTSWAELASNPAEIPSFVWESPPKNRPSVEEFGSSLPTDVTMMSQSPPPQVQSSPVPALTPLSPAATASSSPPGAARQLTPPTQTNTPVTQRARLQPEADVVPELPPSVTEHPVSDAQHWVDAVSSASDWSEFEAVCDQFVIHAVAVSRPNLARPQQQDRQRSGDHPPRQQRGQHRPTFDVREASRIQKLYRTSKKRAIRHILKEKSPSFSGSESDVLDFFREVYSAKEVDEEAVGKLASSLFDVPQGDDSATSLSLPTSAKEIGARLSRMTNSAPGKDRLEYRHIRRADGSFSISEAIFNKCLAEGRIPAPWKTASTILLHKAGPTDDPANFRPIALQSCLYKLFMAVLADRLTKWACENQYLSPEQKSARPCEGCFEHSFLLSAALKDCRRNQKTICIGWLDLRNAFGSIPHPVIKIVLSSLGVPDSLVTLLMDAYNGASTSFTLTGGQTDTVPIRSGVKQGCPMSPILFNLAIELIIRAVKKNASDNHLGVTVQGKNLSILAYADDLVLLSRDTEGLQSLLQVAGSSASTLQMQFKPQKCATLTLDCKRGTNVRQSAHHIQGAAIPSLTEEERYRYLGVPIGLPRLTSLQESSRKLSSDIETISSSLLAPWQKLDAIKTFVIPILQYTLRATEYLKSDLKPLRAAIIKHVKKICHLPVRSSNAFVFASRPSGGLAFVDPGVDADILVVTQAVRTLASDDDTVRAVALGQLTSVVHRTVHSAPSDDCIDKFLSGSSEGPLANSGNSGQASSLWSRTRAASRRLKIRIVGASSGDIKVESGGRAIPSKKVTAGLRSDHHNEMSEKLRSLPDQGKVARALSLDSFANATSWLTSGSFIRFCDWRFIHRARLNCLPTNAAVRRWKQNANTKCRRCDHQLETLPHIINNCRPNMVPIRRRHNSIQERLVKAIHYGDIYQDQHVPGDPNPRERPDITVVEGNKVTIVDITIPFDNGPDALSTAANAKVMKYDTLRQELASRGMDVEVHAFVIGSLGSWHGDNERVLGRLGISRRYRTLMRRLCCIDAIKGSRDIYIEHVTGHRQY

SEQ ID NO: 1432 - protein, 1203 aa, synthetic construct
  source 1..1203: note = Description of Artificial Sequence: Synthetic polypeptide
  VARIANT 3: note = Any amino acid
  VARIANT 213: note = Any amino acid
  VARIANT 235: note = Any amino acid
  VARIANT 271: note = Any amino acid
  VARIANT 328: note = Any amino acid
  VARIANT 347: note = Any amino acid
  VARIANT 372: note = Any amino acid
  VARIANT 451: note = Any amino acid
  VARIANT 463: note = Any amino acid
  VARIANT 770: note = Any amino acid
SGXTGREVKCITVNVLMEQQPHTKAIREGDFIVILLPQSDDETLCCPLCVGRGRYSGKTRVECLNRHVKEVHPDLTTTFRCWGCGFAAPGDKKYPRKIVTQHCATCVPEVSSAPSGRVDGERRVNTRRRLGIAAATEASPVRRTRRNGLASPPVEQNISQSAAPPEPARVPQHPEIVALGESADDEVFRSPVNSPPRDWRAAAPQQAASSSPXAVPGITAATPSNTTRTGNGSAXSILAEHPIPAPPPTNTTEANGRADIPRSGRAPPPGXQAARRRAPTTEQRRIVGLLEAATGREQLEEATTQAMLFLARLTGRRPEPRNAIRPGXRQRHPAQGDVQAQAPDRIXEAKKLQRLYRTSKKRAVQKILAGPXMNCQIDKNTITAHFVELAARRDGGEDWPDVFDREEPTAASGEALCTPITREEVFRRLKGRNNTSPGPDGITYRDLAKAXPGAHVLAALYNXIWRIEATPALWGVSNTTLIYKKGDAMDISNWRPISLGDTVPKLFAAILADRIKRWAVANGRYSASQKGFLEFEGCYEHNFVLQEAIREAKGGRKELVVAWLDLASAFTSVPHSSILQALEGHGLPSKARNIISSLYTGMTTRFHTAEGPTDPILIQSGVRQGCPLSPDVFNLTLEVVLREIQRTGEGYTIEGRRISHLAYADDVAILADSPAGMRRLLFAAERGARAVGLTFNPAKCATLHIAGRGEEAVRPTEFSVQGTPVRALASGEAYEHLGIPTGYQVRQTPINTLRDLLADIGSIDRSLLAXWQKLDAVGTFLLPRLDFTMQGAHIDKGFLTEADKIIKKAAKSWLSLPQRASAELVFLPPSQGGGGLLTVAHSYKMLYSSDVTVSTIAGSTLRRTVSERLKKRASNIDIARFLSGDLDLPRSTSPSTFWTKVRSAALRIKTKLGLRWSWCQGGEVLLMACGDPRAPGTRVSPQTKHLVTTSLRRCLNRHYAESLLAKKDQGKVFEVTRRSGQSNHFLRSGSFTRFCDWRFIHRARLDVLPLNAAKRWQRGMDKRCRRCGSDLETLPHVLSHCGPHSAARQKRHNNIQDRLVKAASRCPGTISVNQTVVGVRGPDAALRPDIVVRDDVNRRVTIVDVAVPFENRLEAFDGVREAKIAKYTPLARQLTDSGYTVTVEAFVVGALGAWDPRNERVLSLLSISRYYAILMRRLMVSDTIRWSRDIYVEHVSGIRQYRE

SEQ ID NO: 1433 - protein, 1458 aa, synthetic construct
  source 1..1458: note = Description of Artificial Sequence: Synthetic polypeptide
MVVSRITARLEATPAPRWDPPLPRRVIASRIADRLVPATAPCRSALNAAFPSPSRDTVTESFTQEDRQLEPLTRHVDEETKDSELPGRAPTVLDEESKDNDATAGEWLLRFDGACRANPGPGGAGAVLFNPSGAASWTCSHFMPGATETNNTAEYTAFLLGARAAADHGATLLRVQGDSQLVLRQVKGIYGAKSTRLRRLRDAVRAELARVGQFSLHHIDRQDNAHADRLANRALDMKSTLVECATHPGRNACTTTLTTSAAAESPASPPPVGARDTPMADAGEERLADVDDGEVYAAMRLGPGEVPERRPRLRLRQLSDEELEAASEMVERLGAALSAKITDAEDWASAEGYITALPYMLYDKLQSYSQAPRGPQQPVLTRSPRGDDRPASSEPNASSTTGGVASEHQPRRRRRRGRRKGRRQRRNPRRSGREGATGGHQQHKKHKPRPPRETQHHREHRLDEALDELHALERTDPHNRPAIAKARRRVGRIRSAINQQLLRHKFDTDEKACVDGILSTARAERAARAATPSPPASGAPTTTVSAPGAIVTNDDGTCPIPSDKLWRHFDAVNTPRLDFDAEAPGSAAFRAAMDHLPAATRLLDLLKEAPSTDEIETQLQHVKASSSPGLDGVGYDVYKRFTIQLLPVLRAAFRCCWLYKKVPQSWKLGVVRLLHKKGPREDPANWRPICLQQAIYKLYTGILARRLTRWMDANDRHAPGQKGFRAVNGCGEHNFLAATLIDNARRKHRPLYEVWYDFRNAFGSVPFALLWDSLQRLGVPPDYVDMCKGLYNQASFVVGNAVDGSTAPVEQRVGVFQGCPLSPQLFNAAISPLLYALRRLPDTGVQLSSVDRPGASAYADDLKIFSGTKAGITQQHELVATFLRWTGMQANPAKCRSMGVRRNTNGAVEADNVHLELDDTPIPSMTHMQSYTYLGIGDGFDHVRRRVELAPKLKTLKHDVTALVESGLAPWQVVKAVKVYLYPRVEYALRHLRPDDQHLESFDLHLRRGLRHLLRLPKNATNEFFYAPVSRGGLGLLPLVELHAALQIAHGWQTLHSPDPAIRRVAREQLYQIADARHRLDKDHWPHRREELCELLLNGELGTSAHAPPKRRNGDIGSLWVDVRKNLKTFGLKVATAPANQETGVPAQPLQLRVPHHAEWLDHGNVLRHVKLHIKNLHWQTWCALSDQGKTARVHGGVGSAFLTRPRGMWESDYRFAVAARLNVVDTVNTLSRRRLRAHDRCRYPACRWKETLAHVLNHCPGTMDAVRGRHDDALKEIEHTLRASSGDRRELRVNQTVPGLPGPPLRPDIQVYNHDKRTVAVVDLAVAFDEQPSEDPESSGLAKAVQIKKAKYAGIKEHLENQGWKVHLSAIVYGSLGSVAASNHKVYTEHLGLLKRDAKRLDRQLSSACIQSSRRIWNFHCAKHRARQHEHQAPPSQATRGRRVTETGGNPSRTDRR

SEQ ID NO: 1434 - protein, 1704 aa, synthetic construct
  source 1..1704: note = Description of Artificial Sequence: Synthetic polypeptide
MLADPAALAAGLARAPPPPSAPQDPSPAFPAGPAGQNPRAAAPARVEVHTVVAPPGRAGGMLPDPGLVEEPIQATYAHDAAQFECALCPYVAESMAVLVQHRRSAHRGTRFKDIFTSGCQCSLVFYARIVAASHAVACARRNQRAVPPAPTPVAPTRPEATPQPTGYLAAAMTAAAAAASSDTVVAAATNMQSAVPAAAKTTGLQLVPPELEPALPQRASCHAGKRRRLNADEAVTPCTPTARVSPQTEVAMAPHDAPQDDTVLQREAAEPQPDPAATPGAQVQRVEDTTAAQDDTVQQDHDADTAQVSPPRRTPTRWGPRPSSTQEPSPMTGEPAATLAARRPLTPAATGTRATRWGPCHRAIGAAAIARLVTGLSTEPAQPQRRQPPPPQEPPSQPEPLAAAATAAADIAATVAADIAAAAANAAMDVDGGPAADETWLLRFDGACRRNPGPGGAGAALFAPSGAVVWTCSHYMPSRSETNNTAEYTALLLGVQSAVHHGASHLEVEGDSSLVIAQVKGTFACRNARLRQLRNRVRHALRSVDTHKLRHIDRQANAHADRLANRALDQRRTSSECGTHGSCMDSCLAVPTALAAQETPPAAPPSTSATPAEGNAMDDIAAEIAARDEGETFPVLPIGPGSAPERQPRLRLRQLSDEERDAAADALQELADTMASKIEDADSWTSGEGYISSIPERIREVLQPYATAPPQPGRSRRQQRRRPPRVTRNQREHRLDEALDDMAATQQATPRDQRAVRRARRRVGRVRASMAQQELRHEFAKDESKCVAKILKTASTETAAEDEHPETCPIDAATLHAHFTGVNAPRTDFDYDATSGREFRAAMSDLPPATVEIDAFDAELTIDEVEDQLTRAAKTSSPGHDGIDYGIYSRFAAQLVPLLHAVFQFCWRHRRVPRLWKVGIVRLIHKKGDPRQPTNWRPICLQPTIYKLYSGLLAHRLSRWLEGNDRLPMAQKGFRAFNGCHEHNFMATTLLDQTRRQHRKLYQVWYDLRNAFGSLPQQLMWRVLRHLGVDSGFIDRCRDIYRDSAFVVANAADGATDPVRQEVGVYQGCPLSPLLFVAALVPLVRRLEKLDGVGVPLADGVRPCTTAYADDLKVFSDSAAGIRKCHDTVAGFLAWTGLRANPGKCASLAVTTNARGNPTRDSSMRLEVHDAAITTLSLHESYRYLGVGDGYDHVRHRLQLEPKLKQLKREAVALLTSGLAPWQVVRALKVYVYPKVEYALRHLRPLQSQLQAFDRVVSKGLRHLLSLPRSATSEVLYAPTSSGGLGLQPLVELHRALQLAHAWQMLHSKDPAIQAVARAQACQVVRKRYRLQEDHWRGRDDELVRSFLNSELAASPHAEVLRRNGDIASLWSDVQRWLRIYHLRFEHCDETEAHGPLSFRVPHHNKWLTHKTVLRHVKLHLKIRHQTRWKGMVDQGKTVRVHGGVGAKFMTTGAGLSDDDYRFGVKGRLNQVDTNSVLKRKRLRAHTTCRDPTCSSAETLAHVLNHCESNMDAIRQRHDDALEQIGSKIRGALDRAKSPTELRLNQTVPEYTGAALRPDIVLRNVAAKTMVIADLAVTFEDQAARARHSSLQLSHDHKTLKYQPIVAELQHKGWRVQTAAIVYGTLGSVQPSNFKAYTEKFKLHKREARQLDLQLSSHCIRASHRIWGWHCRQHRDRQRSGTASRASRGSGGAPRRTSQAPARR

SEQ ID NO: 1435 - protein, 1432 aa, synthetic construct
  source 1..1432: note = Description of Artificial Sequence: Synthetic polypeptide
MCLKSFSSTSGLRRHMARLHRQPSPDASTPSTMTEVFPYPLPKVWPCVVCRENFYHNQTLKRHQKNFHPNVDLTTVYQCSVCGQEFVTGRKASFHFKVHRRMSASAIPTPSAMPSSPMDLIRGLVGEPLPPSPARTPPPLARYISPAPRSSFSPPWNPSPPPRSPTPLPRPLTPPPRSPSPPPRSPTPPPPVTLTTAPVTEPAVPVALTTAQVTEPSAPAVHTAAPVTLSNAPVTEPATPATDPATPVTRLHSPVTHISCSISFTASHAPYSCAAPTSPSVYACSPRRRQCSSTIAAVCNSEASSGNPCLLALPVHRHHLPDTSPQRPGLLFHHPGIPPHRPGRPPHCHGHSLHRHDHRARRPGRQHHLPRSPSPPPRSPSPPSRSPSPPPRSPSPPPRPSTPPPRSPSPTPRSPSPPPRPPILPPRSPDSTHRSLTSHARSPSRPATPPIPVQPRHLRPSTPAHPGVDNAVPPSQQSAIDVWLAELSRSADFESFEDVCDRFVEFAAAEGRNNGRPARPAHQPPRDRGNQGPRPQRPPRPHRPGLGPEFDAQEASRLQKLYRTSKKRAIRTILTGSDVRYSGYRGPHPALMSDTAATEVLTSGFLSLEVFSAREVDTDTIATDTSLLFPNSAQARESGQDLLRPVTQREVSLRLGRMSNSAPGKDRLEYRHIRQVDGAFRVTLEIFNRCLRESRVPSSWKTATTVLIHKKGDATDPANFRPIALQSCLYKLLMAILSDRVTTWALDNDLISSSQKSARPGEGCYEHTFLLSTVVKDARRNQKNMYAAWLDLQNAFGSIPHDAMFTVLTSIGAPEGLVSLVRDVYTDASTDFVTPTGRTAAVPIHSGVKQGCPISPVLFNLTLELIIRAVNASATRDRSAPVVHGQAVPILAYADDLVILSRSSDGLQSLLTTASIMATKIQLKFKPAKCASLSLECRRGTKVRPLEFNVQDKIIPALTEEQHYRYLGVPIGLYRTDDSLETLVAKMTDDIQRIDSSLLAPWQKLDAIRTFVQPCLAYTLRAGDCAKKHLKRLRGQLVKTARKVCNLPTRATTNYIFADRRAGGLGFIDPNVDADIQIITQAVRMLSSPDDITRAIATGQLSSVVHRTIHRAPTQEETDEFLSASMEGDFANSGNSGQASSLWSRARAAARRLKVTISGSLSGSVITKSTENREMAAKSITTALRAQSRAHYTHRLLSLPDQGKVGQSLNQDQYMNSSSWMSSGSYILFCDWRFIHRARLNTLPTNATAQRWKPNTSPACRRCQHPQETLPHILNHCPPNMVPIRRRHNLVQQRIVSAVRHGRVFVDQHVPEDPNPRERPDITVVEGDKVTIIDVCCPFDNGRDALMTAAAAKETKYADLKQALVAAGKDVEVFGFAVGSLGSWLPSNERALRRLGIAKRFRTLMRKLLRIDAIKGSRDVYIEHMCGHRQYT

SEQ ID NO: 1436 - protein, 1216 aa, synthetic construct
  source 1..1216: note = Description of Artificial Sequence: Synthetic polypeptide
MDVDGGPAMPEPWVLRFDGACRRNPGPGGAGAALFKPCGTVAWTCSHYMPNSSETNNTAEYTALLLGVQSAVHHGASHLEIEGDSHLVVAQVKGTFACRNPRLRQLRNRVRHALRAVTSLTLKHIDRKANAHADRLANRALDLKRSLAECGEHQGAMESCLHMNPAAQRQREQPAPPARPACAPTRAESASDHDEDIDAEIAARDGGEAFPTLPIGPGTAPARQPRLRLRQLTEDEQEAAASALQAMAEELACKIEDADSWTSGDGYISAIPSRIRQLLQPFTAAQPHPRPPLQQQRQRPPRVTRTQREHRLDEALDEMAAVQQERPTSRSAVRRARRRVGRIRASMRQQQLRHDFARNESKCVEDILRAASAETAAEEHPETCPIDSGTLHEHFTAVNSPRINFLPDEACGALFREAMADVGTPQERRSALTDELTMDEVEDQLMQAATNSSPGHDGVGYDIYKKFAAQLVPLLHAAFQSCWRHHRVPALWKVGFVRLIHKKGDPNDPANWRPICLQTAIYKLYSGLLARRLSAYLEANGLLLMAQKGFRAYNGCHEHNFVATTLLDQTRRMRRRLYQVWYDLRNAFGSVHQDMLWYVLRLLGVERAFVERCDDIYEDSYFVVGNAADGATEPVRQEVGVYQGCPLSPLLFIAALVPLLRALEKLDGVGVALADGVRPCTTAYADDLKVFSDSAAGITRCHAVVEKFLEWTVLQANPGKCAFLAVTRNARGNPAHDKDMKLSLHDEEVSSIKLHDSYRYLGVGDGFDHVRHRLQLEPKLQQIKREAVALMQSGLAPWQVVKALKTYVYPKVEYALRHLRPLQSQLQGFDRVVAKGLRHLLRLPRSATNEVLYAPTSSGGLGLQPLVEMHRALQIAHAWQMLHSKDPAIREVARAQVWQVARKRHRLREEHWRERDDELVRCFLNSELAASPHAEALRRHGDIGSLWSDVQRWLRIYHLSLVVQDDRNGLDPLGLRVPHHAKWLDHKSVLRHVKLHLKIRHQTRWKGLADQGKTVRAHGGVGAKFMSTWAGLSDDDYRFGVKARLNQIDTNAVLKRKRLRSHKTCRDPTCSSAETLAHVLNHCESNMDAIRQRHDDALEQIGSKIRNALKRGKSTAELRLNQTVPEYTGAALRPDIVLRIVAAKKMVIADLAVTFEEHAAGARHSSLQLSHDHKTLKYQPIVAELQLKGWQVQTAAIVYGSLGSVQPSNSTPTRKS

SEQ ID NO: 1437 - protein, 1417 aa, synthetic construct
  source 1..1417: note = Description of Artificial Sequence: Synthetic polypeptide
MGTQSARERGAPSAPHSHTLGPRTPPRPPACSKHGELESAAGGRDGQCSDGAERERDAERDIRANERDCNGDGDGDDADSDSDDRNDARRRSRRPRATATTTTSAPTTTTTTTTSATTSATTPATDSSPWVLRFDGACRRNPGPGGAGAALFEPGGAVVWTVSHYLPGSETNNTAEYSAMLLGVRSAIHHGATRLRVEGDSHLALSQVRGTFACTNRRLRKLRNRVQAALRELGDYRLVHIDRQANAHADRLANRALDLRKTKVDCGPHATTTDACVQPAEILAPTARLSSSSSSSSSSSSDEPMPGLEEPAADDETDADAEADIAMRDGGEIFPTLQIGPGSAPAQQPRLRLRQLSDDESEAAARTLEHFANDMASKIADADDWRSGEGYISAIPVRLRELLAPYAVPIRSPPRNASSRPPRPQSRPPRPPRVTRHQREHRLDEALDDLAAAQRSTSTDQRSIRNARRRVGRIRTAQAQSDLRSQFATNERACVESILRAAKPDGTEPQASAGTCPIDRATLHAHFAGVNTPRERFDFDDALGADFRAALDVLPPPDQAADAFADELSLGEVEDQLDRVVASSSPGLDGVGYDVFKRFRLQLLPLLHAAYQCCWRHRRVPATWKVGLVRLLHKKGDRAEPNNWRPICLQQAIYKVYSGLLARRLSRWLEANERFTTAQKGFREFNGCHEHNFVASSLLDQTRRLHRKLYAVWYDLRNAFGSMPQPLMWRVLARLGVDTAFLQRCEDIYADSFFVVGNAADGATDPVRQEVGVYQGCPLSPLLFISALIPLLRALQRLPGVGVPLADGVRPCTTAYADDLKVFSDSAAGIQQCHGTVARFLRWTGLRANASKCALLPVTTTARGNPAIDDTLQLELHGDAIARLTLQSSYAYLGVGDGFDHVQHRVQLAPKLAELKRDAVALLRSGLAPWQVLKAIKVYLYPRIEYALRHLRPLQSQLEGFDRAVAKGFRHLLRLPANATNELLYAPVSSGGLGLLPLVELHKALQIAHGWQMLHSKDAAVQAIARAQVRQVVQKRYTLDADHWQGRDDELVQLFLNSELAASPHATIKRRNGDIGSLWSDVQRHLKTLQLRLETREPTADAPDSPNGLLHLRVPHHRKWLSHKTVLRHMKLHIRLCHKHKWQSMSDQGRTVRAHGQAGSHFVSRGVGLWDADYRFALQARLNQLDTNSTLKRRRQRTNATCRAPNCSRTETLAHVLNHCETNMDVIRQRHDGALEQIGAAINAAIKGRRTDTEVRLNQTVPEFNGPAWRPDIQVRDARSKTMVIADLAITFEDQPNDQSASSSLQHSREHKIAKYQPIAAALERQGWRVHTSAIVYGSLRSVHPSNFTVYTELLGLLKRDARRLNTTLSCHCIRSSRRVWNWHCGQHRARQHQRCQEGRAHGSGGNQRAEGGTATT

SEQ ID NO: 1438 - protein, 1369 aa, synthetic construct
  source 1..1369: note = Description of Artificial Sequence: Synthetic polypeptide
MATVRLKYPYPPEGILCGPCAANTNAPQTRPYSDKSGLAKHLKLYHKATLVVECRHCGHEESDLRKMKKHISTNHPVAAAAAPTVPPRLGPTAPPPPRVILRPRFIPRPRTPSPSSSSSSASSPASSRRSVSLPPASPPVSSASSPAARSGRNSPDSQGTAPVTPIGTVRNSPAGSPALSYSTASPIASTITTPRHLSPASPALSAGPGSLGASPPVSPTAATVPPAPPATVPAVMAATVPFVAATTVPSVGSSTVPQRPAGPRRPPPFPIDDWIGRIARVSSLPELDAVSRLLEDEVVKRRPPDPNARPASLHPTRRPPPPSTRPRPCHGTGGTSVSLAALTSSCIREDHRGSLPLLCTSGWDSPWPLSPSPSSHCPSSNPCPSSSTPPSSLLGPPRHSHLTWRGSGSTTPSHRHCSRARYHHLLWRLPYPSSPRLPYPPSALARYPSVPPALDDPLPSLSTIGSEGSPECHLCRNWTPSQGCSRMKWSRDAPLTPTPDPPHSIRHAALPLHLLALVPAMGPAELQSLWRRSRPRAFAKITEGASPFCALPVGTVHGHFLQVHQATAHLPTPVPLPPLRPPRSSDPLVTPISPGEVLDRLRRATDTAPGPDTIIYSEWRAIDPTGRLLSSLFQKVQTFGAPTRWKESTTTLIHKGGDHTAMSSWRPIALLSTVAKIYGSILSHRLTTWAVQNGRLSLSQKGFLPFRGCLDQNYLVQSCLQDARRNKKTLSLAFLDLKNAFGSIPHLTIRHSLEWLGLAPSSIDILEASFLGSSTRVRTETGLTPPISLDTGVVQGAPLSPILFNLAIEPLLRTVPSAHSGFSLHGHVVSVVAYADDLAILAPSTPALQSQLDAISGMADWAGLSFNPAKCATVTLTGKDNSRDTLSLQGSPVPSISDGDAYKHLGVPTGTTTFPSGTDAIKKMTTDLQAIDHSDLAPAQKLDALRTFIMPQLSFHLSHGSVPKAPLTQLDKKIKRAAKHWLFLPQRASNEILYMSHLHGGQSLLPLSVLADIGQVTHAVALLQSRDPAVADLALRTCREVASKRAKKTVNGPELAQYLSGSTDGIYCTPTSDIPSLWTTARAATRRLSSTLPLTWTSPLPSGVPFLSINGSPLSPFRVQSTLTNAIRHNHLSTLIAKRDQGNSYRTSHDPDPSNYWVKGGDFLRFCDWRFIHRARLNLLPVNGARRWDANSIKTCRRCGAPNETLAHVLNVCPVGLPEMKKRHDAIHARIKKALRPSPHTVVHHDRTVPGCGPLRPDILRISERDKSVAIVDIHVPFDNGTDAVERAHETKRAKYELIRRHYEHQGYRVTFDSLVVTALGRLWRGSEAALQALQISSQYSKLLRKLLVADAIHGSRNVYAHHMTGMVM

SEQ ID NO: 1439 - protein, 1305 aa, synthetic construct
  source 1..1305: note = Description of Artificial Sequence: Synthetic polypeptide
MSHSITEVFDYPLPSRWKCTVCLENFFNQQTLKRHQARHHQTTSFLYVFRCSACQAEFDSARKASNHWQSHKRKPILSQPAVNEIPSSGLDPSPPRSRPPVEVIGSSFPDDVSMLSEPSTPSTSLQMDPEVVHPPSRSISFSPMHLSPTQPASPIQIGVEVSFNSSSSLQMDPEVVQPPSPSISFSPMHLSPTQPASPIQIGVEVSFNSSGSLQMDPEVVQPPSPSISFSPMHLSPTQPVSPIQIGIEVSFTSSSPLQMDPEVVQPPSPSMSYSPMHLSLTQPDSPIPVDIDVIPAAEVPLPDIEIPPSPDRHPAAEVPLPDIEIPPSPDRHPVAEVPLPDIEIPPSPDRHPQSPPRPVMMEQPVHTPPPADTQQANGPQHWVTVLANATNWEDFGRVCVEFANHAVEAARSRQDAPQVRPAAQRQPRRPTRPRQPTFDVREASRLQKLYKRSKKRAVRHILRDDAPSFSGSNEQLLDYFKEIYAPPEIDENRAQQLAESLFTDLEEAKESAAALMSPISQQEISTRLSRMSNSAPGKDRLEYRHIRQADGACRVTHIMFNRCLQEHRIPSAWKEATTILIHKSGTTDDPANFRPIALQSCLYKLFMGILSDRMTQWACNHNLLSPEQKSARPCEGCHEHTFLLSSVIKDTKRNQKTANIAWLDLRNAFGSIPHQAIHAVLTTIGAPVSLVMLLKDTYTGASTSFLSTSGETDPIQIQSGVKQGCPMSAILFNLTIELIIRAVKKKATDDGLGLVVHGQRLSIMAYADDLVLMSKTPEGLDAILSVASEQAETLRLAFKPTKCASLSLSCRHGTSVLPREYTVQGHLMPALDEEEQYRYLGVPFGLPRFTNLKDLIGKLKGNIETIASSLLAPWQKLDAIKTFVQPGLSFVLRAADYLKSDLRSLKSAITTNVKKICQLPLRAANAYIFAAKESGGLAFIDPNVDADIQVITQAVRVLSSDDEVVQTIATSQLKSVVHRTIHAVPTEEDIDNYLSGSNEGLLANSGNSGQASSLWSRTRSAARRLHLTLRATTSGTVVVNQQADIDHTRDILPASITRGLRLIQRTTNAEKLKSLPDQGKVARSLSNDPFANGSSWHATGKFIRFCDWRFIHRARLNCLPTNVATKRWKANANGKNGHQQETLPHVLNHCLPNMVPIRRRHDNIQQRLVTAIRHGDVFVNQHVPGDPNPRERPDITVIEGNKVTVIDISVPFDNGPNACTTAAQAKVEKYSALRQALRDMGRDVEVHGFIVGALGTWHQGNERALGRLGVSRWYRTLMRKLCCIDAIQASRDIWVEHVTGHRQYE

SEQ ID NO: 1440 - protein, 1701 aa, synthetic construct
  source 1..1701: note = Description of Artificial Sequence: Synthetic polypeptide
MCSAKTPALKSGRRRGKEVNYEGQIVRVERRRGSRSSTSATDLGTRMVTRGRKKLMEASVREAGHHGGESASTVDVDVVESKKITGKTARRNRRAPSGDGKRRESCGAECGQAVCGNAVADRSEASSPRTPNVSKSGRDKCGQPTIKASTPSPPKRKPTTSSSPRTPCLSKRGARSKIPSTPDTPSTSGGSGKQRVLVSPLLRTEKLPDLEVLQRTEEQVTVRATFPIAQAVVCPLGCEKPYTAVRPDGQFAHQTLTRHFMRVHNCHSVQWHYRCRNCNTDFLPADHRYPLRVVNTHVRSCVSRWEITRKLGESEDLHGVRCDLCDYVGVSKRAVGLHRRRHANENIMQNTGTAAQIEALSKQVGEIRVAGDYSQFKFGKRVRQYVAPTQRRDGLDEEEVHEAEEEEVPAESRTILGEPSTATAIGAEEISATGPVRADTAAQQMICRIGQWCVWPQDYHSIPAPQCWTDTLMDLMIEQIVLQRYPDGAGVSVMSCSAVSAAIHHEISAEFAAQVMSSHDASLYCIIPVNVRNHWQMIVLDVAERVVHYYCSLREHNTVVLSSLLSLVELSGKHTGCTSWKIETHDGAPVQTNAFDCGPFSCLFLKHLLHGIDMNFGDRESAALRTDLKFMIDAVSTPVVPATDKLKKKPDGSATQLTQFQQKFLSASDNWQSPDVDLQAVYDEVVESIVSGHNEPSSRNTSRLQKKSPGKGGKGQVRRRSAVTRDPAWLKSASAVQKAFNSAPARTVNAILRRPNACPSFTATQVADHYFNLRPAVTSLAPEVIDILPPPATDHSMLVAELSESEVWEKMQKAPNSAPGADRITIRMVRMADPGAMILTRFYRACLLRKWVPLQWKQSVCKLLYKDGDKERLANWRPIALEPVLQRVLSAVVASRVTNWARANGLISLEAQKGFQPADGTSEHNFVMEVAIQEARRTNAQLAISWLDISNAFGTVSHQLLFSLLERYGLDPTFTSFIQNLYKDATIVVKGANGTHVTARWSVGVRQGDPCSGILFCLFVEPLLRSVLPSLPCEAETTAVNVLGQPITALAYADDIALFAPSIGVMQQQLCKIQGMASAMGFRFNPKKCASLYLNRAVVNAATFTISGEEIPALVHGDTFRYLGVAAGLGKPQTPFSLLRENLREAELIFRSKLAPWQKMDAYRTYVLPRLTFQLMIAKFNNIKQSAGQYDRAILRLVKRCFQLPVETSTDFIRAPRQCGGLGVPSLRELYATAKVSRALKMLWSPCRVVSSLAASQLQRVASAYFAKRLRDVEAADLSTFMNAARSTPLDRSGYPTCLWMDARKQMSYLTKVAGVDCYFLVGEAGTSFFIRNGLGQTVSVLSPLRKNKVMSVLGGAIQTRHLDAWLQCKRQGKTASCIVLDRSSSRFITTGRYTSFAAMRFALPARLDLLPCRARSSMRSYQNCRRCGYDRETLPHILQHCRQFSAPAYQARHDAVQGRLETVMRRRFPNLRVNRALPEIGSNKRPDLVVVDEEKRLVILLDIAIVFENTAAAFVDARTRKWAHYEKEILAYRLRGYSVTYDAIVVGALGTWDPKNDAILKRIGVVSQRYLRLMKVLVVSEMLEHSSRIYRKHLGLRDLLPDTGTKRRPVGTTETDPPGGDLRQKKRNTISARASGGKCLERRFTSPVGTPSQRGELQCQPCPGPRRPALAGIAPNPPSLQPRKPPPRQHQKPVTKSTAH

SEQ ID NO: 1441 - protein, 1195 aa, synthetic construct
  source 1..1195: note = Description of Artificial Sequence: Synthetic polypeptide
  VARIANT 231: note = Any amino acid
  VARIANT 253: note = Any amino acid
  VARIANT 275: note = Any amino acid
  VARIANT 387: note = Any amino acid
  VARIANT 389: note = Any amino acid
  VARIANT 398: note = Any amino acid
MLQLRLPTPQTLRLLHPSQLPQSHSTKRWSNIYEERARAPKDTTIERVSAASKIPKLDPAKRRIGAPLQLMQGNSISRQLSASSQYVQHNAVVRRVSAPPHTGNFTGSCRRKLALPHRPPSETQPAESYLHCWTTQRDPTLADQHGLQDHPTGLPPEGSHCIKDPRQNSSTEGQRRSGNSQARRIPKRASTAASKTVLPKRTSAALKSVREDTALVLEDPAKWSSQHREGXRQQANPTAVFQPEPAEIEQQPXVRAATPWQAAWMEELARTASFXDFDLLVDRLTKDLSAEIVSGRKGTQENTPTAHRQNQNNMREARRRNISRCYDPAAASRIQKLYRSNRPKAMREILDGPSSYCAIPSERLFLYFKGVFDRVAQNDMQRPECLXPXPRVDYAEDXEQDFTSWEVEARLTKTKNTAPGKDGIRYNFLKKRDPGCLVLTAIFNKCKQFRRTPSSWKKSMMVLVYKKGKQDNPNTRRPISLCSTMYKLYASCLAARITDWSVNGGAISSIQKGFMSCKGCYEHNFVLQTAIHMARRAWRQCAIAWLDLANAFGSMPHQHIFDMLREFGMPENFLQLVRELYEGCTTTICSMEGETPEIPIRSGVKQGCPLSPIVFNLAMEPLIRAISSGLGGFDLYDNRVNILAYADDLVLIADNPESLQQMLDITSQAANWMGLRFNARKCASLHIDGSRRDSVQATSFQIQGEPMIFLEDGQAYQHLGTPTGFRVQQTPEDTIAEILRDVARIDSSLLAPWQKINALNTFLIPRISFVLRGSAMVKVPLNKADNTIRQLVKKWMFLPQRASNELVYISHRQGGANVPRMGDLCDVAVITHAFRLLTCPDAMVRNIAESALQDAVKKRIARTPSNQDVATYLSGSLEGEFGRDGGDFASLWTRARNATRRLEKRIGCHWTWCEERQELGVLVPQVKNTDHTIITPRARTMLERTLKDAIRCQYVENLKRKPDQGKAFEVTCKWDASNHFLPGGSFTRFADWRFIHRARLNCVPLNGAVRHGNRDKRCRKCGYANETLPHVLCSCKPHSRAWQLRHNAIQDRLARAIPPPVGKVAVNSAIPGTDSQLRPDIVITNEDRKKIIMVDVTVPFENRTPAFHDARARKVEKYAPLAETLRAKGYQVQTHALIVGALGAWDPSNERVLRECGIGQRYARLMRQLMVSDAIRWSRDIYIEHITGHRQYQEG

SEQ ID NO: 1442 - protein, 1465 aa, synthetic construct
  source 1..1465: note = Description of Artificial Sequence: Synthetic polypeptide
  VARIANT 27: note = Any amino acid
  VARIANT 59: note = Any amino acid
  VARIANT 61: note = Any amino acid
  VARIANT 425: note = Any amino acid
MQDMEEELLLDVEMETETTEPQTSTAXDATTTTDRPTRWGPHPRAVAAAAIAQLVTGEXAXPALPSRQDRRPAPRSHAPTRSRWGPRHQAVGAAAIASLATGLPASAAPVSRATKHGEGRRRLQTRWGPRVSIPRAARRPGSRWGPPRAAGASGQLPASASGATGQLPEHVEAITTTPRVASDADEGPTPPDPWILRFDGACRRNPGPGGAGAALFKPSGAVVWTCSHYMPSSNETNNTAEYTALLLGVQSAVHHGATRLDIEGDSSLVIAQVKGTFACRNAKLRQLRNRVRHALRSVEKYTLRHIDRKANAHADRLANRALDRRSSSSECEPHGSCMERCCGTDTTPAVQGPTPQAAAAVPVQVWPQWQRQTMVAWTTSHGGRCRDCSTRCGRSLPSLAHRPRLSPRRQPRLRLRQLSDEERDXAADALQELSDVMASKIVDADSWDTGEGYISSIPERIREVLQPYTTRPPRPGHQQQQRRRPPRVTRNQREHRLDEALDDMQATQQAAPRDQRAIHRARRRVGRVRASMAKQELRQAFAKDESKCVSKILAGASAETAAEEHVDECPIDAATLHAHFTGTNAPRTDFDYDAACGQEFRGALDSMQPPTVATDAFEEELTIDEVEDQLTRAAKTSSPGHDGIGYDIYSRFAAQLVPLLHAAYQFCWLHRRVPALWKLGIVRLIHKKGDPMQPTNWRPICLQPAIYKIYSGLLARRLSRWMEQNQRLPMAQKGFRAFNGCHEHNFVATTLLDQTRRSHRRLYQVWYDLRNAFGSLPQQLMWSVLRHLGVDASFIARCKNIYQDSAFVVANAVDGATDPVRQEVGVYQGCPLSPLLFISALVPLIRRLEKLDGVGVPLAEGVRPCATAYADDIKVFSDSAAGIRKCHDAVTRFLEWTGLRANPGKCASLAVTTNARGNPVRDDGVHLELQGEVIAPLSLHDSYRYLGVGDGFDHVRHRLQLEPKLQQIKREAVALMQSGLAGWQVVKALKTFVYPKVEYALRHLRPLQSQLQGFDRAVVRGLRHLLRLPQSATTEFFYTPTSGGGLGLQSLVEMHQALQVAHAWQMLHSKDAAVVAVAKEQVCQVARKRYRLQEEHWRGRGDELVRLFLNSELAASPFADCLRRNGDIGSLWTDVQRTLRLHHLSLTAQDDRDGQDPLALRVPHHTKWLDHKTVLRHVKLHMKIRHQTRWKGLVDQGKTVRVHGGLGAKFVSTGAGLSDDAYRFGVKARLNQVDTNAVLKRKRLRSSKTCRDPTCSSAETLAHALNHCASNMDAIRQRHDDALEQIGSKIRGALERAKSTTELRLNQTVPEYTGAALRPDIVLRNVAAKKMVIADLAVTFEDHAAGARHSSLQLSHDHKTLKYQPIVAELRVQGWQVQTAAIVYGSLGSVQPSNFKTYTEKLKLHKREARQLDLQLSSHCIQASHRIWGWHCRRHREGQRSGNTSRASRGSGGTPRRTSQVRARR

SEQ ID NO: 1443 - protein, 1812 aa, synthetic construct
  source 1..1812: note = Description of Artificial Sequence: Synthetic polypeptide
MLADPAALAAGLARAPPPPSAPQDPSPAFPAGPAGQNPRAAAPARVEVHTVVAPPGRAGGMLPDPGLVDSSPAAATAATPAPVAATATTARAAARVAVEHHAHAEPNQEHLPMARVLVEPMQVDECSSCDRSTLTADDGSGDDVAAPSSMLSNDVAAPMDVDSGTSCPPTLQQPLQRPRALHVGSKRRRLDADDGEEAHQLQEEEEAGIHAPALRLSAASAQPASVLAVYTHNASRFDCTLCAYTAGSFASLLTHRNSRHRRTAFLDRFSAGCACGVPFASRLAAARHAQACASLSSAPSAEASSAAGTSSPTADGADSTVSAVAHAEPGLPHHNDTELTASPPLVSSSDVEVQATKTEATDNRWGAPLPRVLVASRIAGRLAQVPPPRWGPPLPRTTIAARIATRLAATPAPRWDPPLPRSLVVSRIAARLLPALPDAPACEEEAKDSDTMDWAPTWTNEETKESEPHDEAPGQVDEETIDDADGEWLLRFDGACRANPGPGGAGAALFKPSGPVVWTCSHYDPSTTATNNTAEYTALLLGARAAADHGVTKLRIEGDSTLVIQQVRGIFATRSTRLRALRNKVKLELARVGSFSLHHIDRQANGHADRLANAGLDRRRTKLECSVHPDGRGCTNTSVATAAPTAPAAPLPSARPPASTAAPSPDDDHSDQGDIDDGEVYAAMCISPDAVPHRRPRLRLRRLTDEESEEAGNVVERLAASLAAKIADAPDWETAEGYITALPYALYDKLQPYSQSQHQPPRQQQQQQRQRPRQQQQTRQRRQRRCKRGGGSQHRQRKTRRRRPPRVTRHHREHRIDEALDDLHALESRRPQDRTAISKARRRVGRIRSALDQHQLRHRFDTDEKACVDGILAAARDKDRAASVTTTAQTAAPPHSAPASAPSSAVDDGICPIPGDLLHAFFTDVNTPRTEFDADSPIGARFREALAQLPAAIAATELLMEPPSPDEVEDQLQRVRGTSSPGLDGVGYDVYKTFTQQLLPALHAAFSRCWTDQRVPQSWKLGVVRLLFKKGDRQDPANWRPICLQQAVYKLYAGILAHRFTRWLDANTRHADAQKGFRAVNGCGEHNFLAATLTDNARRRRRELHVVWYDIKNAFGSVPHELLWEVLRRMGVPAQFIACCQGIYDAAAFTVGNAADGTTAPIQLRLGVFQGCPLSPHLFTAVISPLLHALKRLPGTGVQLSAVDRPGASAYADDLKVFSDTKDGITRQHQLVTDFLRWTGMVANPSKCSTMSVQRDNRGVLKTANLTLQLDGAQIPALGMTEAYAYLGIGDGFDHVRRRVELAPKLRELKADTTALMQSGLAPWQVVKALKVYIYPRVEYALRHLRPFQQQLQGFDRHLARGLRHLLRLPTSATTEFLYAPTSRGGLGLLPLTEVHGALQIAHAWQTLHSPDPAIRRIARVQLRQVADARHRLDAEHWKERGEELCERLLNSQLGTSAHAPPKRRNCDIGSLWVDVQRHLRSLGLQLQTAPADTHTGAPAQPLQLRVPHHDKWLTHKDVLRHVKLHIKNNHWHRWTSMRDQGKTARAHGGEGSGFLTQPRGMWEADYRFAVAGRLNQVDTYSVLKRRRLRSHDRCRQPGCHRAETLAHVLNHCPGTMDAVRGRHDGALKRIERELHASATDRRDRVELRVNQTVPSLAGPALRPDLQLYNHTKKTVAVVDLAVAFEEQASDDASSSALSLIASHKRAKYDRIKRHLERQGWKVHLSALVYGSLGAVASGNYQVYTTHLGLLKRDAKRLDRQLSVECIQSSRRIWNLHCSQHRTRQHQARPSQGPRGSRATETGGTPSQTSRR

SEQ ID NO: 1444 - protein, 1595 aa, synthetic construct
  source 1..1595: note = Description of Artificial Sequence: Synthetic polypeptide
  VARIANT 337: note = Any amino acid
  VARIANT 1389: note = Any amino acid
  VARIANT 1441: note = Any amino acid
MSGDVVSSDGSSRTTDASGDGDDGAGSSDAAGDVGVVAMDVDQGARRQQPPWQRVGGKRRRLNDVDDEDTRELAELLLEEEDEAGDHAPAPRLSAASARPASVLSVYAHNAQRFQCTLCTYTAASFASLKRHRDSRHRRTAFLDRFSAGCACGAPFASRLAAANHAHACASLNRTLSVAATPAAGELSPTAGAANATVKAATVTPDSPRQDPPELAASPPLASSPDVAVQAADMQAPTRWDPPLPRTLVATRVASRLTDLTPPRWGPPLPRATVVSRIAARLEAAPTPRWGPPLPRVVVASRIAERLAPPELAADDETKDGEEDQSFTEPVAAARSXGGEDANGEWLLRFDGACRANPGPGGAGAALFKPSGPVVWTCSHYMPSSSETNNTAEYTALLLGMRAAADHGATRVHVEGDSTLVIQQVRGIFATRSTRLRGLRKSVKAEMARMEHVTLHHIDRQANGHADRLANAALDRRKTKLECGLHPDGQGCSSTAATTAVPSVVPDRPPSSTAAAPTPSAEPDETEQGDIDDGEVYAAMCIGPDSIPERRPRLRLRQLSETEEEEAGAIVERLAATLAGKITDASDWATAEGYITALPYTLYDKLQPFAQHRHQPRPQHRQQPQRDPPLGTHDGDHGQPSTSRSRRRRRRAKDRLRRRPPRITRHHREHRLDEALDDLRAVEHASPHDRPAVARARRRVGRVNSAIAQQQLRHKFDKDEKACVDGILAAARASRGLATPSASASRHPPPVPSTAADDGSCPIPSDELHAFFTAVNTPAGTFEPMAPVGAPFRSAVAHLPAATSQPELLSDAPTTDDIEDQLQRARGSSSPGLDGVGYDIYKAFAAQLLPALHAAFACCWRHKQVPQSWKVGVVRLLFKKGERTEPANWRPICLQQAIYKLYAGVLARRLTRWLDANGRHADTQKGFRAMNGCGEHNFLAATLVDQARRKRRELHVVWYDFANAFGSVPHDLLWEALERQGVPSPFIACCRGLYADAVFTVGNAADGTTAPIALRVGVFQGCPLSPHLFTAAIAPLLHALKRLPDTGVQLSRVDCLGASAYADDLKIFSGTEGGTKRQHALVADFLRWTGMRANPAKCCTMSVQRDTRGVLKACNLGLQLDGAPIPALTMSASYAYLGIGDGFDHVRRRIELAPKLQELKHDATALLQSGLAPWQVVKAVKVYLYPRVEYALRHLRPFHQQLEGFDRHLVRGLRHLLRLPANATTAFFYAPVSRGGLGLLPLTELHAALQVAHGWQMLNSKDPAIRRIARVQLRQIADARHRIDAQAWQDREEELAQLLLNSQLGASTGAPPKRRNGDIGSLWVDVQRHLRHLSLKLETAPACAETGTAAAMLQLRVPHHDKWLDHKTVLRHVKLHYKNKHWARWAAMXDQGKTARTHGGAGSGFLTRPRGMWEADYRFAVAARLNQLDTHSVLKRRRLRXHDRCRQPGCTQGGDAGARAQPLRRHHGRGPRPPRRRPQAHRARAARVVAGRPGPRRAPGQPDGAVARRPRATARPPAVQPHQEDGGGGRPGRGVRGAGERRPGELGAGTHRRTQAREVCRRQATPRAPRVEGPPLGARVRLARRGAGRQPQGAY

SEQ ID NO: 1445 - protein, 1614 aa, synthetic construct
  source 1..1614: note = Description of Artificial Sequence: Synthetic polypeptide
MDYDDSEFFDAICIPDEDADVLDDGDEGDEGGNDDESSEPLPLAITNAPSAPLHATMLCGTVTQPWLLRFDGACRRNPGPAGAGATLTRPNGIILWTHYRYIPDKTATNNVAEYEALLDGLRCAAHHGVKHLRIEGDSNLVIEQVKGIFACSTSLRPRRDQVREILRHFETYSFRHIDRALNRQADRLANQALDLLKTVSVCALSQTRVQDDTGAAHGCWHWTPPDASPTDDASTSILTQDVPVPMDIDDYDPDEPMNAADDPVSINAEREGGTVYPVLRLGPNVVPERQKRLQIPWLPPREMQKLEKKIEVLGETFASRIRDAPDWFSAEGYITALTSELATLIRQSTAATTGPNAARPCERTISKEKRRARRTTPLQRALAEAKHELQIIQPDASRKSVRKAARRVKRISQAQQRHDLRRLFSTNERRCVEKILRDPPVGPSSTSSSLPATDDDRCTIDPADLFAYFQTQATAPTNFDFDDEGGELFRSVLDELPRADQEVHLLEDEITRDEIEDQLSRISKSTAPGLDGITNAVYVRFKLQLLDALQAAFNACWRYNRVPSMWKAAFVRLIYKKGNRAVPSNWRPICLQQTVYKLYTAILASRLQRWMDANARFTMSQKGFRAFNGCHEHNFVATCLHDQTRRLRKKLAIVWYDLRNAFGSLPHEYLWRVLARLGMPPQFVARVRQLYADASFTVESRDGTTDPVQLERGVYQGCPLSPYLFIAALIPLVRALHKLKDQHGIVLAPGVTDCVSAYADDIKIFARSGTGAKALHEIVVRFLSWTNMAANPAKCALMVTDGARGGDDTDASMTLSIEGETIPRLTGKEGYVYLGVEDGLAHERRATCLRDSLKAASADVVRLLRSDLAPWQIVRAIKSHVLSRFDYVLRHLRPFLSLFDGFDKMLVRGIKRLCQLPQTATSEFLFSPTSAGGLGFLPLKELFAALQIVHALQMLHSKDANVRAIARHQALQVVRKRYALQSDHWSDREEELLEEFFNGTLERSPFALAKKVSGDIASLWTDVRVNLTKYGLKFGEAHGRRLQPLVSHTDKQLAPQQWASAIKTHMRLRHLKRWTTLVDQGKTARMHERIGSAFLTRPSGVYDASYAFAVRARLNQVDTRSALKRKRIVNNSRCRVSGCSELETLAHVLNHCRFGSDSIRARHAETLLLIKTTMERELTRPGRQHQRLLVDATVPEARDPVPSNDAAESNIGAMAPSISHLRPDIQLYDNKTMEAVIIDLAVAFEDQSTDDAASSSSFARVKGVKTKKYEVIKQFLEYKGYTVHVAALVYGSLGSVDTGNFAVYTERLGLRKGAVRRLECSLSARHINFAHRMWRRHAIAHTTGLRLIGTNSVQQQGVQRAPAEKQQHQRPVQRPSRAQAPRDQPSQQQQSQQSFQQQSQQSQQSQQSQQSQQSRQRHAPTPTPVPVPVPVPVSTPTLTPTPTPTRRPKPAPSSTQPQQGAPAQRRQQREQKKQPACRRRHATAVRETPPAAPTAARTATPTARPTATTRSTSTTRSTATATSTTRSSAPTSRPSAPRPRSSAPRPRSSAPTTRSAAPTTRSAAPTAIATTSVYKSRRTTNAISGATTRRSASSKRAPMQPRTALTPTQQQQRQ

SEQ ID NO: 1446 - protein, 1983 aa, synthetic construct
  source 1..1983: note = Description of Artificial Sequence: Synthetic polypeptide
MPRSLASEPVHSSASRLPSQAPPTSRSGAAHTPPPSLQARPLASADAGLAATALASPQDPPYDVAPPGRAAGRLPDSVSPGATLSAATARALAVRHWPLELDSDSSDDEDAQDPHAAAPGPPADVASVLAPPGRAGSMLADPAALAAGLARAPPPPSAPQDPSPALPAGPAGQNPRAAAPARVEVHTVVAPPGRAGGMLPDPGLVDSSPAAATAATPAPVAATATTARVAVEHHAHAEPNQEHLPMARVLVEPMQVDECSSCDRSTLTADDGSGDDVAAPSSMLSNDVAAPMDVDSGTSCPPTLQQPLQRPRALHVGSKRRRLNADDGEEAHQLQEEEEAGIHAPALRLSAASAQPASVLAVYTHNASRFDCTLCAYTAGSFASLKTHRNSRHRRTAFLDRFSAGCACGVPFASRLAAARHAQACASLSSAPLAEASSAAGASSHTVDGADSTVSAAGHAEPDLPRHNATELTASPPLVSSTDVEVQATETEATENRWGTPLPRVLVASRIAGRLAQVPPPRWGPPLPRTTIAGRIATRLAATPAPRWSPPLPRSLVASRIAGRLLPALPDAPACEDEAKDSDEMDWEASEPHVEAPGPVDEETIDDADGEWLLRFDGACRANPGPGGAGAALFKPSGPVVWTCSHYDPSTTATNNTAEYTALLLGARAAADHGVTKLRVEGDSTLVIQQVRGIFATRSTRLRALRNKVKLELARVGSFSLHHIDRQANGHADRLANAGLDRRRTQLECSVHPDGRGCTNTSVATAAPTASAAPSTPTRPPATTAAPFHSDQGHIDEDDERRADIDDGEIYAPMTLGPDEVPARRPRLRLRQLSDEELEAAGAIVERLSASLSAKITDAEDWGTAEGYITALPHLLYDKLLPYSRTAPRHQRPPRPSRNQQDHPQPRRDQPQRNVDEQQHAESQQGEDQRQQQPPTRRRRRRGKRRGRRQRRHPRQPGQSTRASQQSRQRRPRPPRVTRHHREHRIDEALDELHTLERARPQDRSAIDKARRRVGRVRGAINQHLLRHRFDTDEKACVADILEKAHAARAARTAQAAGAATSTGGAATAPTQQAATSALGDADDGTCPILADELWQYFTGTNTPRWEFNPATPVGEAFRTAMARLPPATRLRELLTEAPTADEIETQLQHVRGSSSPGLDGIGYDVYQRFAQQLLPVLTASFKRCWTAKMVPQSWQVGVVRLLYKKGAHDDPANWRPICLQQAIYKLYTGVLARRLVRWLDVNDRHAPGQKGFRAVNGCGEHNFLAATLIDQARRKRRSLYEVWYDFRNAFGSVPFQLLWDSLQRLGAPADFIDMCKGLYHQAAFVIGNAADGPTAAIRQQVGVFQGCPLSPQLFNVAISPLLFALRRLPETGVQLSGDDRVGVSAYADDLKTFSSTKAGATKQHELVAAFLAWTGMKANAAKCSSMGVRRNSNGATEADNLDLALDGTPIPSMTHMQSYTYLGIGDGFDHVHRRIELAPKLKTLKQDTTALLESGLAPWQVVKAVKVYLYPRVEYALRHLRPEDQLLESFDLHLRAGLRHLLRLPKNANNDFFYSPVSRGGLGLLPLVELHAALQIAHGWQMLNSTDPATRRIAREQLHQIADARHRLDKAHWKERGDELCQLFLNLDLGTSAHAPPKRRNCDIGSLWVDVRKNLQAFGLKLETAPADAESGTPALPLQLRVPHHEKWLTHRDVLRHVKQHLKNKHWRAWCAFQDQGRTARAHGGVGSSFITRPRGMWESDYRFAVAARLNMVDTSATLARRRLRAHDRCRYPGCRWKESLEHVLNHCPGTMDAVRGRHDGVLREIEHALRAPSGARRELRVNQTVPGLPGPALRPDIQVYNHDQRTVAVVDLAVAFDRQDRDDPETSGLAKAAAEKKAKYTGIQRHLERQGWKVHLSALVYGSLGSVAPNNYKVYTEHLGLLKRDAKRLDRTLSVACIQSSRRIWNLHCAKHRARQHQTPSQSRGRRVTETGGAPSRTDRR

SEQ ID NO: 1447 - protein, 1493 aa, synthetic construct
  source 1..1493: note = Description of Artificial Sequence: Synthetic polypeptide
MQDQVDAEQQARNRWGPPLPRPLVASRVAARLGEVPPPRWGPPLPRGVVVSRIAARLEAVPVPRGGPPLPRSFVATRIADRLAPPSPDLSLLDEEMKESEPPDPTHHSADEDSTDAETADAVMEPAFVSDPPTATPREWRLQFDGACRGGPNPGGAGALLYNPEGAVVWTGSHYMPGAKETNNSAEYTALLIGARAAADHGARQLRIEGDSLLVIRQVKGLYATKSTRLRQLRNAVRHELARVGQHSLHHIDRQGNAFADRLANRALDLKSDKVECKEHPVAGACTTCMGSPSAGPPATPPPTTADIEMADAGSDDELRADIDDGEVYAPMRLEPGVIPTRRSRLRLRQLTDDEMEAAGEVVERLSAGLSAKIADADDWETAEGYITALPYMLYDKLQQYTQVRHGTARSPAPHPQRRDVQGQVETHREPRHETIGQPDQPGEPSPTRRRRRGKRKGRRQRRHPRRTNCGGGGRQQRKQRHPRPPRGTRHHREHRIDEAIDELHALERARPQARPAIAKARRRVGRIRSAIDQQLLRHRFDTAEKECVDGILAAARTARDARTTVRAAAATGTTATPETAVTSGTEQQDDNGTCPIPSEVLWRHFDSVNTPQRDFDPEAPEGAAFRSAMARLPAATRFMELLKEEPSTDGIEVQLQHASSTSSPGLDGVGYDVYKRFASQLLPVLKAAFKCCWTHKQVPQSWKLGVVRLLYKKGDREDPANWRPICLQQAIYKIYTGVLARRLTRWQDANDRHAPGQKGFRPVNGCGEHNFLAAMLIDHARRKHRPLYEVWYDFRNAFGSVPLGLLWDALERTGVPAEYIAAVQGLYDHAAFMVGNAVDGSTAPILQRVGVFQGCPLSPPLFSAAISPLLHALQLLPSSGVQLSGDDRPGVSAYADDLKTFSGTKAGVTEQHELVAMFLRWTGMAANPAKCRSMGVRRNGNGAIEADHLELALDDTPIPTLTHLQSYTYLGIGDGFDHVRRRVALAPKLKLLKQDATALMESGLAPWQVVKAVKGYLYPRVEYALRHLRPDDQLLESFDLHLRRGLRHLLRLPKSANNDFVYAPVSRGGLGFLPLVELHAALQIAHGWQMINSPDPAIRRIAREQLHQVADARHRLDKDHWKQRGDELCELLLNGELGTSAHAPPKRRNGDIGSLWVDVRKNLKAFGLKLATAPADPESGAPAKPLQLCVPHHAEWLDHRNVLRHVKQHMKNKRWRAWCSHVDQGRTARAHGGVGSGFLTRPRGMWESDYRFAVAARLNMLDTVNVLARRRLRAHDRCRHPGCRWKETLAHVLNHCPGTMDSIRGRHDDALKEIERTLHASSGDRQGRTELRTNQTVPGLAGPALRPDLQVYNHDQRTVAVVDLAIAFDEQPRDDPESSGLAKAAAEKKAKYAGIKRHLERQGWKVHLSALVYGSLGSVAPSNYKVYTEHLGLLKRDAKRLDRQLSVACIQSSRRIWNLHCAQHRARQHQDQPAPRGRRVTETGGTPSRTDRR

SEQ ID NO: 1448 - protein, 1716 aa, synthetic construct
  source 1..1716: note = Description of Artificial Sequence: Synthetic polypeptide
MLADPAALAAGLARAPPPPSAPQDPSPAFPAGPAGQNPRAAAPARVEVHTVVAPPGRAGGMLPDPGLVEEPIQATYAHDAAQFECALCPYVAESMAVLVQHRRSAHRGTRFKDIFTSGCQCSLVFYARIVAASHAVACARRNQRAVPPAPTPVAPTRPEATPQPTGYLAAAMTAAAAAASSDTVVAAATNMQSAVPAAAKTTGLQLVPPELEPALPQRASCHAGKRRRLNADEAVTPCTPTARVSPQTEVAMAPHDAPQDDTVLQREAAEPQPDPAATQGAQVQRVEDTTAAQDDTVQQDHDADTAQVSPPRRTPTRWGPRPSSTQEPSPMTGEPAATLAARRPLTPAATGTRATRWGPCHRAIGAAAIARLVTGLPTEPAQPQRRQPPPPQEPPLQPEPQAAAATVAADIAATVAADIAAAAANAAMDVDGGPAADETWLLRFDGACRRNPGPGGAGAALFAPSGAVVWTCSHFMPSRSETNNTAEYTALLLGAQSAVHHGAKRLNIEGDSHLILSQVRGAFACNNKRLRSLRNRVQASLRQLDWYRLQHIDRKANQHADRLANRALDLRRTVTECGPHAETRNRCFQTPQPLVEPGETHCVPGSDEVLAANTAMEDATAVPTEDDEAEVAARDGGEVFPTIAIGPDSAPAKQPRLRLKKLDEDDFDAAAAAVTRVSEELASKIVDAGDWTSGEGYISAIPERLRAALRPFALPTQPARPQPREPRMQQPPRRPPRVTRDHLEHRLDEALDTMENVQRSTPQNQKAVRRARRRVGRLRSAMDRTRLRKKFATHERECVAEILRRASTEEAANPSQEKCPIDRATLHEYFTATSTQRTPFDYDSAKGTEFRTFLEVMSTPSHETSALTAEPTLDEIEDQLAHVKAGSSPGHDGVGYDVYRRFQVQLLPLLHAAFRFCWRHRRVPALWKVGFVRLLHKKGDPQQPNNWRPICLQTAIYKLYSGLLARRLSKFLEANELLPMAQKGFRAFNGCHEHNFVATTLLDQTRRMHRRLYQVWYDLRNAFGSLPQQLMWGVLRQLGVTEEFVARCSGIYEDSYFVVGNASDGATEPVRQEVGVYQGCPLSPLLFITALVPLLRALENQDGVGVPLADGVRPCATAYADDIKVFCDSATGIQRCHALVTRFLEWTGLQANPAKCAFLPVTRSQHSNPTRDRDIELRIHGEAIATLGLQESYRYLGVGDGFDHVRHRLQLEPKLKQIKREAVALLHSELVPWQILKALKVYIYPKVEYALRHLRPLKSQLQGFDSAIVRGLRHLLRLPENSHDGLFFSPTSAGGLGLLSLVELHEALQVAHAWQMLHSKDPAIRAIARTQVGQVARKRFKLVEEHWRGREDDLAQRFLNTELAASPHATETRRNGDIGSLWNDVRDTLQTLGLKFAAGDEEEAPGLLQLRVPHHTKWLSHSTVLRHVKLHMKLRRMDTWKSKVSQGTTVREHGGVGSRFITAGAGLSDAEYRFAIAPRAHLIDTNSTLKRRRLRANDTCRAPGCSYTEPPAHILNKCSPNMDAIRKRHDDALERIADALRRKVEKSGGRLEVAINKTVPEYDGAALRPDIVLRNTETKRAIIADLAITHENQPTDATTSSALQQSRDNKITKYQTVAAAMMRAGWRVRVTGIVYGSLGSVLPSNFKVYTELLALLKRDARRLNRQLSSHCIRASARIWSAHCRRHRERQRSGNASRASRGSGGAPRRTSQASARR

SEQ ID NO: 1449 - protein, 1546 aa, synthetic construct
  source 1..1546: note = Description of Artificial Sequence: Synthetic polypeptide
MSGDVVSSDGSSRTTDASGDGDDGAGSSDAAGDVGVVAMDVDQGARRQQPPWQRVGGKRRRLNDVDDEDTRELAELLLEEEDEAGDHAPAPRLSAASARPASVLSVYAHNAQRFQCTLCTYTAASFASLKRHRDSRHRRTAFLDRFSAGCACGVPFASRLAAANHAHACDSLNRTFSVAAAPAAGELSPTAGAANATVKAATVTPDSPRQDPPKLAATPPLASSALVVDPDHAEQQARERWGPPLPRTLVAGRVAARLSEVPAPRWGPPLPRGVVAFRIGHRVLPPEMTSDEETKDDSSVQDGDRQDYPVAAMDVDSGMSGEWLLRFDGACRANPGPGGAGAALSQPDGSVVWTCSHYMPSSSETNNTAEYTALLLGTRAAADHGTTTLRVEGDSTLVIQQVRGIFATRSVTLRHLRDQVKLELARVGRFSLHHIDRQANAHADRLANRALDLRRTVSECGVHPDGNGCTPTAIDDRPLAPTQQPPDAPPPPPAADIEMEDPDDEDLADIDDGEVYAAMRVGPNATPQRRRRGRSGTAKKHRRQRPPRVTRHHREHRLDEALDDLHAVERSTPSDRTTVRRARRRVGRVNSAIEQQRLRHRFDTDEKACVTDILAKACATREAARTTASGGDPPAGPATPAAGSADDGTCPILGEELWRFFDSVNTPRQEFAPDAPVGAAFRSALARLPAATSCKELLTAAPSAGEVEDQLQHVRGASSPGLDGVGYDVYQHFAAQLLPALTAAFKACWTAKRVPQSWKLGVVRLLHKKGAREDPANWRPICLQQAIYKLYTGLLARRLVRWLDANDRHAPGQKGFRAVNGCGEHNFLAATLVDQARRKRRTLFEVWYDFRNAFGSVPFALLWDALARLGVPDDYVTMCKGLYESAAFVVGNAIDGTTDPIALRVGVFQGCPLSPQLFNAAISPLLFALQRLPATGVQLSGDDCPGASAYADDLKIFSGTEDGIKRQHALVADFLRWTGMAANPNKCCTMSVQRDGRGVLKTDDLQLDLAGTPIPALSMSASYTYLGIGDGFDHVRRRVELAPALKQLKDDATTLLQSGLAPWQVVKAVKTYLYPRVEYALRHLRPFQQQLEGFDRHLARGLRHLLRLPGNATAECFYAPVSRGGLGLLPLTELHAALQVAHGWQLLNSKDPAIRRIARVQLRQIADARHRIDSRAWEGRDEELCELLLNSQLGTSPDAPPKRRNGDIGSLWVDVQRHLRTLGLKFATAPACADAGSAATTLQLRVPHHDKWLDHRTVLRHVKLHVKHRHWSKWAAMRDQGKTARAHGGAGSGFLTRPRGMWEADYRFAVAARLNQLDTHSVLKRRRLRAHDHCRQPGCSRAETLAHVLNHCAGTMDAVRGRHDDALKHIERALHASSPGGQDRVELRVNQTVPSLAGPALRPDLQLYNHTKKMVAVVDLAVAFEEQASDDPESSALARIAAHKRAKYAGVKRHLERQGWKVHLSALVYGSLGAVPAGNHKVLTEHLGLLKRDAKRLDRQLSVACIQSSRRIWNLHCSQHRARQHQAPGGSRAAETGGTPPRTGRR

SEQ ID NO: 1450 - protein, 1392 aa, synthetic construct
  source 1..1392: note = Description of Artificial Sequence: Synthetic polypeptide
MARVLVEPMQVDECSSCDRSTLTADDGSGDDVAAPSSLNSNDVAAPMDVDSGTDCPPALQQPPQRPRALHVGSKRRRLDADDEEEARQLQEEEEAGIHAPALRLSAASAQPASVLAVYTHNASRFDCTLYAYTAGSFASLKTHRNSRHRRTAFLDRFSAGCACGVPFASRLAAARHAQACASLSSAPLAEASSAAGASSHTVDEADSTVSAAGHTEPDLPRHNATELTASPPLVSSPDVEVQAPETEATENRWGTPLPRVLVASRIAGRLAQVPPPRWGPPLPRTTIAGRIATRLAATPAPRWDPPLPRSLVVSRIAARLLPALPDAPACEEEAKDSDTMDWAPTWTNEETKDSEPHDEAPGQVDEETIDDADGEWLLRFDGACRANPGPGGAGAALFKPSGPVVWTCSHYDPSTTATNNTAEYTALLLGARAAADHGVTKLRVEGDSTLVIQQVRGIFATRSTRLRALRNKVKLELARVGSFSLHHIDRQANGHADRLANAGLDRRRTKLECSVHPDGRGCTNTSVATAAPTAPAAPLPPARPPATTAAPSHDDDHSVQGDIDDGEVYAAMCIGPDAVPHRRPRLRLRHLTDEESEEAGDVVERLAASLAAKIADAPDWETAEGYITALPYALYDKLQPYSQAQPQPPSQQQQQQQQRPRQQQQTRQRRQRRGKRGGGSQRRQRKTRRRRPPRVTRHHREHRIDEALDDLHAIESRRPQDRTAISKARRRVGRIRSALDQHQLRHRFDTDEKVCVDAILAGARASQGATTAPPSATTDPPAPMDDSRCPIPGDDLWRFFDSVNTPRRSFDAEAPDGAAFREAMACLPAATRAQELLTEAPTVDEVEDQIQHARASSSPGLDGVGYDIYKQFAAHLLPALHTAFVCCWNHKRVPQSWKLGVVRLLHKKGDRQDPANWRPICLQQTIYKLYAGILSRRFVRWLDANARHAEAQKGFRAMNGCGEHNFLAATLVDHARRKRKELHVVWYDLANAFGSVPHDLLWETLARQGVPPTFVDCCRGIYSDAAFTIGNAADGTTAPIRLRVGVFQGCPLSPHLFTAAIAPLLHALKRLPVTGVQLTGVDRPGAAAYADDLKTFSSSVDGIKRQHELVATFLRWTGMAANLSKCSAMSVQRDSRGVLKTGDLCLKLNDAEIPALSMTASYAYLGIGDGFDHVRRRLELAPMMKQLKHDATALMQSGLASWQVVKAVKVYLYPRIEYALRHLRPFKQQLEAFDEHLRRGLRHLLRLPTNATSAFFSAPTSRGGLGLLPLTELHAALQIAHGWQILNSPDGATQRIAREQLREIPDARHRLDTAHWRNRDAELCELLLNSQLGQSSHAPPKRRNCDIGSLWIDIRRQLGTLGLKFETAPGRRSHQPARPAIAAFACRTTTSG

SEQ ID NO: 1451 - protein, 1606 aa, synthetic construct
  source 1..1606: note = Description of Artificial Sequence: Synthetic polypeptide
MSGDVVSSDGSSRTTDVSGDGDDGADGAGSSDAAGDVGVVAMDVDQGARRQRPPWQRVGGKRRRLNDVDDEDTRELAELLLEEEDEVGAQAPALRLFAASAHPASVLSVYAHNAQRFVCTLCAYTAASFASLKRHRDSRHRRVSFVDKFSAGCACGTPFGSRLAAARHAQACASLSIPRTVTAPAAAGDLSPTATGANATASAAATSPDLPRPASPELAASPPQTSPFDVAIQADAAEQTAWTRWDPPLTRAAVAARVASRLAVVPAPRWGPPLSRTLVASRIAARLDAQTSRWGPPLPPAMVASRIASRLAAMPAPRWGPPLLRTVIASRIADRLLPPELAADEETKDDDVHMDNAASVDVDEESEVADVVMTDHDGEWLLRFDGACRANPGPGGAGAALFKPSGPVVWACSRYMPSSSATNNTAEYTALLLGARAAADHGATHLRVEGDSTLVIQQVRGIFAARSTRMRALRNQVQSELARVGSFSLHHIDRQDNAHADRLANRALDLRRTVIECGIHCDGVGCTATTTEVQSSSAPEIPTRPVADDHDEHEVVDVVDVCGVCGVCGDRGTCGVCDVSGDIDDGEVYAAMRTGPDAVPARRPRLRLRKLTDEEQEEAGTLAERLGATLAAKIADARDWESAEGYITALPYLLYDKLLPYSQGPARSLPVRQHQRQQQQPDGQFQRPTQSRSAARRQRRQRHRARRRPPRVTRHHREHRLDEALDDLHAVERATPSDRRSIRRARRRVGRVNSAVEQQRLRHHFDTNEKGCVEILLAKARAQRSTTVARTAVGEPNSGAAEDDGTCPIPSERLHRHFTEVNTPGSSFDAMAPVGAPFRAALAHLPAATEASELLTEAPTPDEIEDQLQRAKGTTSPGLDGVGYDVYKAFSTQLLPVLHAAFQCCWQHHRVPQSRKQGIVRLLYKKGPREDPANWRPICLQQVIYKTYAGVLARRFTRWLAANGRHADAQKGFRTVNGCGEHNFLASTLIDHARRSRRELHMVWYDLKNAFGSVPQELLWEVLQRMGVPPAFVEVCQGLYQDAAFTVGNAADGPTDLVRQLVGVFQGCPLSPHLFTAAISPLLHALDRLKDTGVRLSADDRPGASAYADDLKIFSGTADGVKRQHALVADFLRWTGMVANPNKCCTMSVQRDGRGVLKACDLELQLDGARIPSLIMNASYAYLGTGDGFDHVRRRIELVPALMQLKDDATALLQSGLAPCQVVKAVKTYLFPRVEYALRHLRPFQQQLEGFNRHLVCGLRHLLRLPVSATTSFFFVPVSRGGLGLLPLTELHAAPADRRPAPPPRPRPLEGAGGENMRAADQLAARDVGPRPTQAPQRRHRLVVGRRPAPPPRTRPQARDRAGVRGDRHRGGDAAASRAAPREVAGPPHGPAAGEAAHEEQALAAVGRDEGPRQDRPHPWWCRERLPHAASRPMGDRLPLCSGGSAQPAGHAQRAEAPAPPRARPVSTAGLLPCRDTGTRAESLRRHHGRGPRPPRRCAQDHRARAHRVVRAARTAPSSGSTRPCPRSPAPRCGPTSSSSTTPRRRWRWSTWPWRSRSRRATTPRALRWRASPRTSEPSTPASSGTSSAKGGRSTSRRSCTARWAR

SEQ ID NO: 1452 - protein, 1540 aa, synthetic construct
  source 1..1540: note = Description of Artificial Sequence: Synthetic polypeptide
MATSSSSVSSGNVQTEVRCVYHGKGDLLLECPVAHCPSIHPTVATITKHLKKHHTPQFEQITTKNLTITYTCSQCSFSTTGLTQHHISKHYKTCKGVGAVQEGNKGRFCCPACGTRWALLCKARHHFNNVHFEYDTPPIAAFSGTPYKLKKRKFTIINKALTYSCPLPLNQLLCPLWSCSLTILNKPLSSVQQETAHGDGSQGQSYVPTQLRQVLRARCHCGNPPIGKGHWASCQGKRPLSSPKGGRSSPTPPANLTLHFLNYLPFQLPSQSSSPQSSTLDPTACKARVPIPSFLRGDCEVTFFIIPSVNFYRPYLSYPLRMFWRNRTSSGHCSLHRVVRGFVRERLVPHPRSKSPARTPLEFLCEFRLAGVFPDPGKVASLRPVPAPLTLCLSPPVAGPMISCEDHSAPPSVRSSSPIPNSPASVSSVEAHLSDLLDKVSSGELRPLSPTLPSSGFFGPLLPPTPPPRPTPSAEKASPSGLSYLPCREVKIASIARPSPASQRVGCDADRTGPSLNPNYQQTSPPSTPSFSPIVRPPKFPRSGAKVNSKSKPPGVRPRRAKPIEPGTESASPVDVDTISSSVQEPCTPENRTPEFFYERKWLVSILNIHEREGSNFFQFNRDLEYWTQLLSGSQKGGRAKRASYNRGAANQAMKNRDSGRKDFDPRPVAGHSSGGGTELGSRPRYPKGARLRADFWRDMKGTVRKLLDGSNGERRCGIPLDIIERKFRQVSMPGWIDHRRYAAGASPSLVTQAETDVAITSEEVEAVLSGLNVQSAPGSDGLSYRFWKGLDPSGRLLSCLFEIVRRHGRIPGAWPTCSVILLCKDAQGDVQDVGNWRPITICRTLYKLYAAVIARRIQTWAKQGGVLSRLQKGFMPVEGVFEHVFMLDTVLSDAKLRRKNLLAVFLDVRNAFGSVRHECLLKVLRHFDAPHYLVELVRDIYTGATCRVRSSVGETGDIPCDRGVRQGYPLSGILFNLVTEVLIPGLSAGNDGYRMACLGGKLTQVLAYADDLVVVTENRDQMLRQLGVCEEFGRWAGLAFNQRKCGLIGWRTLRGGRRVALEDPLLLNGVEIPLLRPGEHYKYLGAMTGVMSVPRTGSQLIKDFRARLQRLFTSFLTPHQKLIALKRFLLPSLSFHLRVRPIARSELIALDRRVRECLRVAFRLTKPSCQAVFHTPTDMDGLGVPSVCSESSILTIAQGFKVLTSPDGTVSATASARVKLYAAKFGGLTEAGPSDWARYLSGDDVNGNSTRKPGANLPSGLWTRVRCASRQLGAVWRVCPENGITVRVRNSVITSRDRRKLIRSFHDCSNQQWKEQWMQHPNQEKTAAAHMAYADANRWVKQPSVMEPHTYFFALRARLNLLPTRVSRAIYSRDQHPDILCRRCGASVESLPHVLNHCPPNMSIILGRHNLVLQEVLNAVDKTQFKEISVDRTVPEHMSETGEALRPDIVARRNDGSVVVVDVACPFDQKANFDEAAKRKLLKYDKLCCNIAASTGKPVECHSIVVGSLGSLAEGLSTSLRALGITDFARSKLVACHQG

SEQ ID NO: 1453 - protein, 1144 aa, synthetic construct
  source 1..1144: note = Description of Artificial Sequence: Synthetic polypeptide
MPVSTGAETDITSSLPIPASSIVSPNYTLPDSSSTCLICFAIFPTHNILLSHATAIHHISCPPTPVQDGSQQMSCVLCAAAFSSNRGLTQHIRHRHISEYNELIRQRIAVQPTSRIWSPFDDASLLSIANHEAHRFPTKNDLCQHISTILTRRTAEAVKRRLLHLQWSRSPTAITTSSNNHTITDIPNTEARYIFPVDLDEHPPLSDATTPNASTHPLPELLVILTPLPSPTRLQNISESQTSHESNKNSMHTPPTYACDPDETLGATPSSTIPSCFHSYQDPLAEQRGKLLRASASLLQSSCTRIRSSSLLAFLQNESTLMDEEHVSTFLNSHAEFVFPRTWTPSRPKHPSHAPANVSRKKRRKIEYAHIQRLFHHRPKDASNTVLDGRWRNPYVANHSMIPDFDCFWTTVFTKTNSPDSREITPIIPMTPSLIDPILPSDVTWALKEMHGTAGGIDRLTSYDLMRFGKNGLAGYLNMLLALAYLPTNLSTARVTFVPKSSSPVSPEDFRPISVAPVATRCLHKILAKRWMPLFPQERLQFAFLNRDGCFEAVNLLHSVIRHVHTRHTGASFALLDISRAFDTVSHDSIIRAAKRYGAPELLCRYLNNYYRRSTSCVNRTELHPTCGVKQGDPLSPLLFIMVLDEVLEGLDPMTHLTVDGESLNYIAYADDLVVFAPNAELLQRKLDRISILLHEAGWSVNPEKSRTLDLISGGHSKITALSQTEFTIAGMRIPPLSAADTFDYLGIKFNFKGRCPVAHIDLLNNYLTEISCAPLKPQQRMKILKDNLLPRLLYPLTLGIVHLKTLKSMDRNIHTAIRKWLRLPSDTPLAYFHSPVAAGGLGILHLSSSVPFHRRKRLETLLSSPNRLLHKLPTSPTLASYSHLSQLPVRIGHETVTSREEASNSWVRRLHSSCDGKGLLLAPLSTESHAWLRYPQSIFPSVYINAVKLRGGLLSTKVRRSRGGRVTNGLNCRGGCAHHETIHHILQHCALTHDIRCKRHNELCNLVAKKLRRQKIHFLQEPCIPLEKTYCKPDFIIIRDSIAYVLDVTVSDDGNTHASRLLKISKYGNERTVASIKRFLTSSGYIITSVRQTPVVLTFRGILDRASSQSLRRLCFSSRDLGDLCLSAIQGSIKIYNTYMRGT

SEQ ID NO: 1454 - protein, 1132 aa, synthetic construct
  source 1..1132: note = Description of Artificial Sequence: Synthetic polypeptide
  VARIANT 46: note = Any amino acid
  VARIANT 59: note = Any amino acid
  VARIANT 89: note = Any amino acid
  VARIANT 172: note = Any amino acid
  VARIANT 204: note = Any amino acid
  VARIANT 205: note = Any amino acid
  VARIANT 217: note = Any amino acid
IAKFDNNTNSASDAAPLSPGGAVADLSASEGTTDNDQAMSPAMSLXTVPLVGNRVACPXCEKREANLFFLNLSDLDRHLTQHHPDAPIXWSCIDCAKCFPKLHGARCHIPKCGGASSQARTGEFQCEACPMSFGSRRGLSTHERHAHPAVRNIKRRGADPPEENTKSWKVEXVARLKGLWEIFKDHKYPNKEISKFLTTKTVDXXKYQRKKLNLIGXESPQEATSLATEGGCDLVSSGNASFGSPVGRNENEEELIHEWKLSLKNEINKPTEVPPILKEVYNRLMLIWEEHQDDRDSLTESLDHFIRTALYELINKINKNQTDLKTKRAAKTKSPKNNRNSRKRFSYARCQELFHECPRRLADAVVNNDQAYLEPARQPPGSEEVRGLYEKLWGQVGSTYVPAPVTRVPKLSLSEIFPPIAAEDVGERIGKIRKKAAAGPDGLQRDHLTIPGLPIIMAKIYNILVYCSYFPSAWKENRTTLIPKINKPCSLVENWRPITISPILGRIFSSIIDGRIRRGTVLNMRQKGFTSENGCKINIELLNSALNYSKRNSGGIFTIVDISKVFDTVPHAALKPCLAKKGVPALIVDLIDEMYKNVKTTIKTKDGGVEIMIRRGVKQGDPLSPLLFNLCLEPLLEEIEEQASGINVSEHRKVSVLAFADDIVLLGADAREAQHQINVLTDYLQSLMMNLSIEKCQTFEVVAKKDTWFIKEPGLKIGNQIMPTVDPDEAFKYLGAKIGPWKGVHCGVIVPELLSVVKRVRKLSLKPGQKVELLTKYIFPRYIYHLLVSPPSDTVLKLLDSEVRQEVKTILHLVPSTATGFFYTPKACGGIGIPRFEHIIKLGTLKSAIKIANSIDPAVAGLIDDAAIKKLKQTANSLRINWPASLEDIEKARKRLRKEHISQWADLKCQGQGVPDFIKNKTGNLWLEDHSLLKPSRLIDALRLRTNTFGTRSVLARADKNIDVTCRRCRAQPETLGHILGLCQHTKGLRIKRHDEVKSLLEGRLKSKKNNEVFVEPTIKAGGSLFKPDLVIKNGERVLVVDVTVRYENKNYLALAEKEKIEKYRPCLRALKEIFNAKGGEILPVVLGSRGTITPNTEKVLKRLGIANNDIKTILLNVLRSSIELCNIFIDD

SEQ ID NO: 1455 - protein, 1186 aa, synthetic construct
  source 1..1186: note = Description of Artificial Sequence: Synthetic polypeptide
  VARIANT 16: note = Any amino acid
  VARIANT 18: note = Any amino acid
  VARIANT 27: note = Any amino acid
  VARIANT 33: note = Any amino acid
  VARIANT 49: note = Any amino acid
  VARIANT 50: note = Any amino acid
  VARIANT 51: note = Any amino acid
  VARIANT 63: note = Any amino acid
  VARIANT 66: note = Any amino acid
  VARIANT 88: note = Any amino acid
  VARIANT 90: note = Any amino acid
  VARIANT 95: note = Any amino acid
  VARIANT 96: note = Any amino acid
  VARIANT 120: note = Any amino acid
  VARIANT 122: note = Any amino acid
  VARIANT 128: note = Any amino acid
  VARIANT 133: note = Any amino acid
  VARIANT 155: note = Any amino acid
  VARIANT 168: note = Any amino acid
  VARIANT 173: note = Any amino acid
  VARIANT 182: note = Any amino acid
  VARIANT 184: note = Any amino acid
  VARIANT 186: note = Any amino acid
  VARIANT 192: note = Any amino acid
  VARIANT 195: note = Any amino acid
  VARIANT 203: note = Any amino acid
  VARIANT 204: note = Any amino acid
  VARIANT 218: note = Any amino acid
  VARIANT 237: note = Any amino acid
  VARIANT 260: note = Any amino acid
  VARIANT 271: note = Any amino acid
  VARIANT 280: note = Any amino acid
  VARIANT 285: note = Any amino acid
  VARIANT 311: note = Any amino acid
  VARIANT 347: note = Any amino acid
  VARIANT 353: note = Any amino acid
  VARIANT 357: note = Any amino acid
  VARIANT 365: note = Any amino acid
  VARIANT 367: note = Any amino acid
  VARIANT 369: note = Any amino acid
  VARIANT 386: note = Any amino acid
  VARIANT 387: note = Any amino acid
  VARIANT 401: note = Any amino acid
  VARIANT 410: note = Any amino acid
  VARIANT 413: note = Any amino acid
  VARIANT 414: note = Any amino acid
  VARIANT 445: note = Any amino acid
  VARIANT 457: note = Any amino acid
  VARIANT 459: note = Any amino acid
  VARIANT 483: note = Any amino acid
  VARIANT 490: note = Any amino acid
  VARIANT 505: note = Any amino acid
  VARIANT 516: note = Any amino acid
  VARIANT 523: note = Any amino acid
  VARIANT 528: note = Any amino acid
  VARIANT 533: note = Any amino acid
  VARIANT 545: note = Any amino acid
  VARIANT 556: note = Any amino acid
  VARIANT 599: note = Any amino acid
  VARIANT 621: note = Any amino acid
  VARIANT 647: note = Any amino acid
  VARIANT 650: note = Any amino acid
  VARIANT 664: note = Any amino acid
  VARIANT 691: note = Any amino acid
  VARIANT 694: note = Any amino acid
  VARIANT 701: note = Any amino acid
  VARIANT 716: note = Any amino acid
  VARIANT 719: note = Any amino acid
  VARIANT 720: note = Any amino acid
  VARIANT 724: note = Any amino acid
  VARIANT 736: note = Any amino acid
  VARIANT 743: note = Any amino acid
  VARIANT 752: note = Any amino acid
  VARIANT 762: note = Any amino acid
  VARIANT 773: note = Any amino acid
  VARIANT 775: note = Any amino acid
  VARIANT 782: note = Any amino acid
  VARIANT 785: note = Any amino acid
  VARIANT 789: note = Any amino acid
  VARIANT 804: note = Any amino acid
  VARIANT 817: note = Any amino acid
  VARIANT 820: note = Any amino acid
  VARIANT 836: note = Any amino acid
  VARIANT 837: note = Any amino acid
  VARIANT 841: note = Any amino acid
  VARIANT 873: note = Any amino acid
  VARIANT 876: note = Any amino acid
  VARIANT 880: note = Any amino acid
  VARIANT 890: note = Any amino acid
  VARIANT 895: note = Any amino acid
  VARIANT 896: note = Any amino acid
VPPGAEARGRYHHPRXEXARQGEPPSXRVFLVXLPDSNPPCPICGDHVXXXSVLALHCVEGHXWAXVQYQCTHCGILCHIPRCQGRVXEXTGKDXXCPECPASFDEKAGLSQHKRHTVTXSXERVAGXLLRAXLRHGCWSVEEEETLTRLDAMFXGARNINQLIAAEXVSKMXKQISDKWRXLXLXPEQTTXGGXAESASVVXXESMTPEMEAQSPAXPPGKIRKIFTGQDGHAGGXAWENQEDFHWTRWARRWLKRGQXLSDKVQEVLGXWVEGQPRIXAWVDXVSLDVLTLFLGVPPGPQRAPSKKGPXEGGKPTSWMNKRAIKWGTFLRYQHLFGANRKLLAAXILDGAXRNQXTLLLEEVXQXYXGKWEAEPPFEGLGRFGXXRDVDSFAFEALITXEEAVKHMMXMAXXSAPGPDKLTLRDLRRADPEGDALAELFSLWXITGVVPDRLKEXQXVLIPKAVDFEKLRQLGNWRPITIXSIVLQLXSRVLTARLTAACPIXPHQQGFISAPXCAENLKXPELIXRKVKXDRRPLGVAFVDXARAFDSVSHDXISWVLKAKGVDQHIVNLIEDSYQKVTMRVQVFSGSTPPISIKXGVKQGDPMSPLLFNIAMDPLIXKLKTVRQGVKVGSASLTTLAFADGLXLLXDSWEGMQHNITTSXTPGRACNTTSRHPRGLLQPHGPTSATXKMXGVLLESXMRLLYGEQLRGLEDXRPXXHDAXARRADTISGLEXRSLGWDXQTRFGYATXLLAREDGDCXAQTNAEALCWXSXPFPGCAXRPXYANXGWVASEALDSMSRRXVKEWFHLPACTDXLLXSRHRDGGLGLLRLARXXLAAXVRRPIRVATSSDEVTRKVSYACGISDEVERLXLAXGGDXSNVPRFEDPXAPKSXXVQGPHEAAQETPRVVRTQAIPWPSNWRAEEHSKWAQLSCQGERVELFCNDPVSNGWINSRGQLAERLWIMALKLRSNIYPTREFLGRGQAGTNIGCRHCTHPRETLGHILGICPAMQEARILRHNKLCKILAAEGKNCEWTVYYEPHLHNAAGELRKPDLIFVRDGTALVVDITVWYEGGPATLLSTTAEKATKYLDLNTQIQELTGAEQVTYFGFPIGARGKWHADNWRVLSELGLSNSRKERVTRLLSWRALLGSVDMVNIFVSKHRQENLLDEHCTPAEQVVSSYAS

SEQ ID NO: 1456 - protein, 1055 aa, synthetic construct
  source 1..1055: note = Description of Artificial Sequence: Synthetic polypeptide
FERRSNSWGYRPLEPRSVGTESNNNSPRSNITITSATSRPGDQPREAIAVVNLAGEIPCAVCGRLFNTRRGLGVHMSHQHKDELDTQRQREDVKLRWSEEEAWMMARKEVELEASGNLRFPNKKLAEVFTHRSSEAIKCFRKRGEYKAKLEQIRGQSTPTPEALDSITSQPRPSLLERNHQVSSSEAQPINPSEEQSNWEIMRILQGYRPVECSPRWRAQVLQTIVDRAQAVGKETTLQCLSNYLLEVFPLPNEPHTIGRSNLRRPRTRRQLRQQEYAQVQRRWDKNTGRCIKSLLDGTDESVMPNQEIMEPYWKQVMTNPSTCSCDNTRFRMEHSLETVWSAITPRDLRENKLKLSSAPGPDGITPRTARSVPLGIMLRIMNLILWCGKIPFSTRLARTIFIPKTVTANRPQDFRPITVPSVLVRQLNAVLASRLASKVNWDPRQRGFLPTDGCADNATLVDLILREHHKRWKSCYLATVDVSKAFDSVSHQAIIKTLQAYGAPTNFVSFIEEQYKGGGTSLNGAGWSSEVFIPARGVKQGDPLSPLLFNLIIDRLLRSYPREIGAKVGNTMTSAAAFADDLVLFAETPMGLQTLLDTTVGFLASVGLSLNADKCFTVSIKGQAKQKCTVVERRSFCVGERECPSLKRTEEWKYLGIRFTADGRARYSPADDLGPKLLRLTRAPLKPQQKLFALRTVLIPQLYHQLTLGSVMIGVLRKCDRLVRQFVRRWLDLPLDVPVAYFHAPHTCGGLGIPSIRWIAPMLRLKRLSNIKWPHLEQSEVASSFIDDELQRARDRLKAENVQLCSRPEIDSYFANRLYMSVDGCGLREAGHYGPQHGWVSQPTRLLTGKEYLHGVKLRINALPSKSRTTRGRHELERRCRAGCDAPETTNHILQKCYRTHGRRVARHNSVVNAVKRGLERKGCVVHVEPSLQCDSGLNKPDLVGIRQNHIYVIDVQVVTDGHSLDQAHQRKVERYDRADIRSQMRRFFGATGEIEFHSVTLNWRGIWSGQSVKRLIAKDLLIAEDTKLISVRAVNGGVTSFKYFMYCAGYTRS

SEQ ID NO: 1457 - protein, 1222 aa, synthetic construct
  source 1..1222: note = Description of Artificial Sequence: Synthetic polypeptide
  VARIANT 1109: note = Any amino acid
  VARIANT 1124: note = Any amino acid
  VARIANT 1139: note = Any amino acid
  VARIANT 1170: note = Any amino acid
  VARIANT 1191: note = Any amino acid
  VARIANT 1217: note = Any amino acid
PAAPRAWGAVEAGPWPGRTRAVEPAPSPESSPSEAARAAPAGEGHGPGHESPSVQRPEADTTAPGVSAPTREGEPPSTRVFLVRLPDSNPPCPICRDHVGKPSALALHCVESHAWADVQYQCTHCKKVSANKHSILCHIPCCQGRVPEWTGKDWACPECPASFNKKVGLSQHKRHVHPVTRNVERVAGSLSRAGLRPQTRRGCWSVEEEETLTCLDAMFRGARNINQLIAAEMVTKMPKQISDKRRQLGLCPEQTTLGGDAESTSVVEEESMTPEMETQSPINPPGKIRKILAQRARRWLKKGQGLSDKVREVLGAWVEGQPRIHAWVDSVSLDVLTLFLGVPSGPQRAPNKKRPKEGGKPTSWMNKCAVKWGTFLRYQHLFGANRKLLVAIVLDGADRNQCTLLLEEVFQAYREKWGLEEVLRAYRGKWEVESSFEGLGRFGVRRDADNFAFKALITPEEVVKHMMAMASKSAPGPDKLTLRDLRRADPEGDALAELFSLWLITGTVPDGLKECRSVLIPKTVDREKLGQLGNWRPITIGSIVLRLFSRVLTARLAAACPINPRQRGFIAAPGCAENLKVLELLLRKRKRDRQPLGVVFVDLARAFDSVSHDHISWVLKAKGVDEHIVNLIEDSYQKVTTRVQVFNGVTPPISIKTGVKQGDPMSPLLFNIAMDPLIAKLETDGQGVKVGSASLTTLAFADDLVLLSDSWEGMLKNISILEDFCNLTGLRVQPKKCQGFFLNPTCDSFTVNNCEAWKIAGREITMLGPGESTRYLGLNVGPWVGIDKPDLGTQLSSWLERIGTAPLKPMQKLSLLVQYAIPRLNYQADYAGIGRVALEALDSMNRRKVKEWFHLPACTSDGLLHSRHRDGGLGLPRLAKAIPEAQVRRLIRVATSSDEVTRKVSYACGISDEVERLWLARGGDMSSVPRFEDPEAPRSPGVQGPCEAAQEIPSVVRKLAIPRPSNWRSKKHSKWAQLSCQGEGMELFCNDPVSNGWNNSRGQLAEHLQIVALKLRSNIYPTREFLGRSQASTNVGCRHCTHPHETLGHILGICPAVQEARIIRHNKLCKILAAEGKKCEWTVYYELQLLNAAGELCKPDLIFVRDGTXLVVNVTVGYEGGPAXLLSTAAEKATKYLDXNAQIQELTGAEQVTYFGFPIGARGKWHADNXRVLSELGLSNSRKERVARLLXWRALLGSVDMVNIFASKHRQENLSDXALSPS

SEQ ID NO: 1458 - protein, 1247 aa, synthetic construct
  source 1..1247: note = Description of Artificial Sequence: Synthetic polypeptide
MQCTSRLADAPRFARVGVEGEGVGASGNGTDAQLWYGCTGCDEAFSSLRGLRIHAAQKKHGNQDGLLRLPAGRPRKRRVGKSTTAGASDRVTTDPVPAPVPESPGLLPGLPGPSLPGCSDLPPGVLPGGWSASPGPLSWPPSLDAGPLPGPSRVSPGPSRPSPGKPTGPPSLDAGPLPGPSRVSPGPSRPSPGKPPGTPEPLPGSPGGRRGVSPGQPGSRTDPSSSAGAGHFVCPQCSRAFSSKIGMSQHQKHAHLEEYNAGINITRTKARWDPEETYLLARLEATLNPDHKNINQTLHAALPRGSCRTLESIKAHRKQAAYRDLVTSLRSARESSEAQHVPDRPLETPEPQTPANPQRDSKQAVIEALQSLIGRAPPGSFQGARLWDIARQATRGTNILPLLNSYLRDVFTLPTKPTRKKPAVRPARSRRKQKKQEYARTQDLFRKKQSDCARAVLDGPTSSSVPGTGAFLQTWREIMTGPSPALEAPPLPTRGEVDLFFPATAQEIQSAEIAVNSAAGPDGFSARLLKSVPALLLRVMVNLLLLVRRVPAALRDARTTFIPKVPDAVDPSQFRPITVASVLQRLLHRILAKRALEAIPLNFRQRAFQPVDGCAENIWLLSTALNEARTRRRPLHMASVDLTKAFDRVTTDAILRGARRAGLSGEFIGYLKELYTTSRTLLQFQGESLLVEPTTGVRQGDPLSPILFNLVLDEYLSSLDPDISFVSGDLRLDAMAFADDLIVFASTPAGLQDRLDALVEFFDPRGLRVNVKKSFTLSLQPGRDKKVKVVCDQIFTIGGTPLPASKVATPWRYLGMTFTPQGSINKGTSEQLDLLLTRTSKAPLKPQQRLVVLRNYLLPRLYHRLVLGPWSAALLLKMDTTIRGAIRRWMDLPHDTPLGFFHAPVTEGGLGINSLRASIPAMVLQRLDGLHFSTHPGAEVAIQLPFLTGLHRRAEAAAQYQGQRLLSKADVHRMWSARLHGSCDGRPLRESKRVPAAHRWAAEGTRLLSGRDFISITKLKINALPTLERTSRGQHKDIQCRAGCQAVESLGHVLQACHRGHRGRIRRHDNIARYVCGRLTQIGWAVKWEPHYSVAGRTLKPDIVAHRGAETVVLDAQVVGTSMRLGFHHAQKKEKYSLPDLLHQVCEGRRDAARVSTITLNFRGVWAPESAQDLKSLGLTDNDLKLLTVRCLQGGAQCFRLHRRMTTVVKATGDEANALPAHSGLPPTQLGGRTLGPSAHNQSARTT

SEQ ID NO: 1459 - protein, 1099 aa, synthetic construct
  source 1..1099: note = Description of Artificial Sequence: Synthetic polypeptide
MSNTSHSKLNLKMDNKLKTSLETPSGVRADSIITRVRTSSNRGEHSNGVTYPRCEQGVAPLDTHGGICDAPPQVTVPATETDKQKKCEYCEFTYLKPRQIGTHMRKRHPQEWNDIKRTKFLSEKRQKRWLDEDFELLCIGQEEYLVLSSIGKQGKGINQYIQTKYFPTLSTDAIKSQRKSRRFSEYSEKRSRELQPCNTSSDPEELPNEAVTENSPLSFDPLDRDVVKKISSKDHGDQILLVQEHLINGRYQEANTLAKAIFEKLSGKFPNLKTGDHRPGKQQTARKVGKKRVRGSGKKLSPSKQNRRELYAIVQKQWRTKKRSKVINQILTGNLNKEQSYTHTPDQLAQFWSTLFGRVSPRDDRPINHRRSVIPELDKPLSVEEVEAALKGAKDAATGIDGVPISHLKHLGSAALTILYNGLYVTGSIPDPWKRARTILIPKSNPPASPGDYRPISISSYFYRIYTSAISKRLASAVSLDDRQKGFIKEDGIRDNLSLIDTLINETKAGSKSLFMTFMDVKKAFDSVSHYAIARSLEWAGVPDGMRSVIADLYQDCTTDICGRSVKVTRGVKQGDPLSSTLFNLVIEMVMSNVPERLGIQFQGHRLFYLAFADDLVLLTRGPTANQKLVSLVHEQLARVGLELHPGKCKSIAIMADPKRKTTFVDQGSSVLIGGEPVSSLGPQEWYKYLGIKLGSGGMPQGIYRDQLADLLAKTDSAPLKPQQRLYILRSHILPKFNHRLMFERVTCQTLEGLDKLIRTHVRKWLKLPKDTPGPAFYADKGSGGLGLITLRYRVPLLKLRRHKKMADSPDPVIRLIPNAEPTISLLARWTKMCSLYGKQYQHKSELSKIIRDKYWTMCDGKGLRTEVPPDTAKKTLSLLFEDRTPLKPGQLIGAIGVRLNTLGTPARNNRAKGYSPEANICDKCPGNRQATLGHISQTCPATHGRRVKRHDKIVNRIAKALKERGSVKNILTEPHLRHDKLPLRKPDLIVHTEKSVEIIDVQVVADQGISRHEDEDQQKKIVKYDVDGYKRAAYKMLGIDYGSIPCNVSAFTITWRGNLAPHSLKLASRLQFSPVLKYIVADSLVDTWGAFLIWGKTS

SEQ ID NO: 1460 - protein, 1085 aa, synthetic construct
  source 1..1085: note = Description of Artificial Sequence: Synthetic polypeptide
MNERLTDELTTEFILSDMFLWDYPCTDQNKCYPCNLVFLDHRTWSSHMARVHPHANKTYKCRICNRTADSIHKIASHYGRTCKSLIGKTNAITTTIDETLFSCLHCSRGFTTKTGLGVHTRRTHPTEHEAILQQNTPGRKVRWGEEEVEIMAHKEAQQKDEDINMNQLIQNSVMPHRTLEAIKGKRRNIKYKELVRTLKETTYKVENQCLVNLVLPTTSEITTTPSEGDQPAIRAEKEQSPTAAEDLQVIINDLKSQNFSHNQALLLLNSHVEKFLNRSKPIKRKDHVNQQEIDENRHRRQSKQTKYRRYQYLYHTNKKALLDEITSDRSGPSIYPTEESIRGTFVTLFESNSPPDNIPSKLKNDQSCIDIVKAITLDELIKTLAIMKDKSPGQDNITLSDLRTLPIKYLLDILNIILYIQDIPQIWKQHRTRLIPKTKEELEKPSNWRPITISSIVIRLLHKILSYRLGQQLKLNYRQKAFLPVDGCFENSALLHFIIHNARQKHENTQIVSIDLSKAFDSVSHESIIRALNRFNLSKESITYLTNIYKCNLTDIVFGSTIMRNINLKRGVKQGDPLSPLLFNMIMDELLDNLPTYIGVNVGNQKVNSMMFADDLILFAETECGMNKLLDITTKFLDDRHLKININKCNSLRFIKYGKQKTFSVATTSSYFINNEPINPVSYVKGFKYLGIEFDPRGKRSISCNLLAAMLNKLTRAPLKPEKKVYLINNNLIPRIIHQLVLGKVTKGLLMSLDSEIRKTVKLLLRLPHDTPDSFFYTSVSNGGMGIRNLCDSVALSIINRHNKLITSDDLVIRALSQQSYTIATLKQAHIIAGSKFPSKSLNQNKWSNKLYQTTDGRGLVYCQSQTENNSWITGNHRTIKSYNYIDMVKLRINALPTKSRCNRGTLETKQCRFKCRSINNQISEETLAHILQKCDRSHYSRIARHDSLVQFLATAAQKLNWEVIKEPTLPSDTNKAKPDLILVRDSHVLIVDVAVPWESRSLAHAYDFKVKKYATDKKMQAYLKTIYPEKEIRTEALIISARGGWCALNNMVTKKVGLSSAWVKLALIKVMEGSVKIWRSWSKG

SEQ ID NO: 1461 - protein, 1031 aa, synthetic construct
  source 1..1031: note = Description of Artificial Sequence: Synthetic polypeptide
  VARIANT 78: note = Any amino acid
  VARIANT 87: note = Any amino acid
  VARIANT 200: note = Any amino acid
MKKVLNNETEKLPGSNLTFMCGFCDREFDTARGRGVHESRGHLVERDAAVQSRVKAVVSKKYYYSNEEDVALAKMQLXHADLAKSEXLEAMYLALGKGRTREAIEQHIRKSLRYKGVLEEQRKLLETARGNVRQNNVGVPASNATKNLQRFLESLPLGTNRREERLDRIIRSNSIESQRLELIHYCNDMCQDFVQLDCQXNPINAIRRRNPKRLSKKQLKRAKFSALQRLWIRDRKAAAQLVLKDKLDSLLSNKEDSKDLGSYWQQVFERESELDRRPIPQVVENEELNSPVLEKEVEWAVKNIKKSTAAGPDGLTALALKKIPYSELVKLFNIILLVGFLPDVLKNSRTILIPEVDNPQGGGDYRPISINSVLTRTLNKILAKRVSEGDFGINGQKGFKSVDGCLENLATVESILADARMKKNKLAVVFLDMSKAFDSVNHESIVRAGEIKGYPKLLMTYVKECYNDATTNVAGVTAKFNRGVKQGDPLSPALFNNVIDLAIERVSGTGIGYNMGGKKYSVVAYADDLVLFGESREGLQIALTALLEELKLNGLTPNPAKSASLTFERSGPHWFASTDTVTALGDQIPAMGNIETYKYLGIKFNSCGVVKGSLPGIYTKKLELISKAPLKPQQRLAMLTDFLIPGVLHQAVFGQTNAGDLRSLDKRTRRAVRSWCHLPSDTSTAFIHAKAKDGGMGIPSIRAEVQFGKLDRFGKLPNVKDERSKVLADNAHIKKKMLEKLGVGIPIKGVRCKNKLEFYNKMREELIKSNDGIGLKEASLVPSANTWLKLSDLHMSGRTFVGCLKTRGNLMATVTRTSRGGQNPGIELNCKKGCQYQGSLNHIVQKCPVVKGLRIKRHDEVVKYVEEITKKAGWSATMEPIIPFEGSHRKPDLVLVRGDLGKVVDIQIVSDHCGLDEKNSCKIGKYDNDIIRNYVRGLGPSRVEVAAITLNWRGVWSRDSFNLIKRLGMTEMDAKIISMRVLASTAKMFKTCKKVLEPVCRTKTADCDGYGPEETSARPCHELNLKESSGT

SEQ ID NO: 1462 - protein, 1395 aa, synthetic construct
  source 1..1395: note = Description of Artificial Sequence: Synthetic polypeptide
MENSFAWEGTSSAEGRTTVEDSPSSSDDFVSNVGFKVAKADPTVWEEANMSEDNTIIEDPPSSSDDFANNVGFKVTRADPTAWEEASTSTETEDLPSSSNFIDNVETQIDMAGPTAWEDADSNEDNIDEGTPNNINNNLAIVRGRADAYACSCCERNFISLKAIGTHLKETHNKKVVFECAKCQHTFVKAHGLACHVPKCKEDADTPMLNRLLHGCGECGLAFNTRRGLSQHERHRHPSACLSTRRRSRLDGIARKKSLRNRRDIWTNDEIRLLKQLMIQYEHAKKINIKIAEHFNHKNAKQVMHKRRSLREKDMALGAPHDAPPPLAEEPIIEVVEGAREELEQAPVDVILPDLEALTVNDGRGGGSPVLTEGGESTRDMEENGGTDTRSPSPREERAGSTPWERGWQPRVDRGRGEYKGYGGERGDRHTVSLSQRGESGVDPLTPGGVVEDYDDSYLEDYFPGWDEDEHMHIIGRLDLSDESEQGEAAVSPRLGSFGDLLEEVNAMEGKDNLSEALAETLGLVLHEGHRVEYIKEKMNINVKQMATEILAHGANKGNPKRRKEAVAAKRNPGTRLDRAQRDNQAKAKAKEKKRIFSETQTQYKKNPHRLVEKLLDGKGDERCSVSLEVIQRTYMNRFSRESKEVDIGAYVDPETVEDNQGIVDPISKAEIERAISTTKKGSAPGPDGVTYDALKAYGNCQLYLLIMYNTWLAMGKVPSEAKTYRSILIPKGQGDPMDINNFRPLTLANVISRLYSKILTRRLDGAVSVCPRQRGFTHKASIEDNTLILRELIMKSKRNKECLAVVLLDLAKAFDTVSHDLIIKALRRHRVHEHLISVIMDLYEGGTTSFTTDEGTTCPIAIRSEVKQGDSLSPVLFNLALDPLLATLEQRGKGVEIGGHTFVSLAYADDTALVSSSHLDMTANLDITVEYLNATGLSLNVRKCQGFLLTPINKSFLVNEAESWVVEREAIPWVEPGDTAKYLGVQVGPWSRPWPSIQPVIKRLTAYCESIDKAALKPRQRIHILTTYIAPRIAFEIAEGGYSTLVDCRGGIQYTRIREVDMTIRNYVRKWLFLPACLSNSFLYTRRGEGGLGLVSFYDYVPTERMRKLVRVCDSEDPVIAGAAASLGLRERAAKISAQTGLPVPVKPKGAHNAWRKVQKKKWKAQPTQGKGVSCYQHRLGNKWLGAPSFLTENDYIWAIKLRTNLVPTREAMGRGIIGRNQVECRHCHTTIETMGHISGYCQMVLDIRLIRHNRICKALIKAATATGLRVTEEPRIVGTDGKNYLPDLIFSAGAGEPCYVVDPTVVWDDDPKNLREAWRGKVRKYTPIIPAVEAMLHPSSVQIFGFVCGARGTWCPMNDDIAKIVGLKNSGISRTLQIVLCDTIRMVKAFMAR

SEQ ID NO: 1463 - protein, 1236 aa, synthetic construct
  source 1..1236: note = Description of Artificial Sequence: Synthetic polypeptide
MSGKRIVEMSGCDEKICQNKHCLKRRWAWISGPKGETSPPRKRGTCENVSFQDKSHASDPDPLKAPEAREDAGSVAPQWVGEIKTPSLTSRDGVSEVVLPPQPVHAEGVSPASDSKDKATKITLLISLPVCDLRCGRCERPLETVGKAVRHFAVAHPTVSVVFKCQKCEKSSKNSHSISCHIPKCKGMTETRTDVEGDHGCDHCQEKFTTAMGLTQHKRHRHIVQYCKEKEGEMTARRKGEVEAVKWSEWEESEVARLSDGLAGLKMINRRIADSLGTGKTAEQVRQKRRRMRPEKVRCDKPKEAKDKSNLIKMLSIPSATPTPQTGLKGFLLGELNGVATKGEVQIGGVTLSLRGVEQDSALLNTSALELQRLLGGRAGSANPLSLQRERETTLPSERRKTKQGEYRRVQKMFRSNEKKIAKYILDGNGDGEAASPPLEIALAFKSRWEEVETFHGLGQFYSRGEADGVVFRSLISMSEVCENLGAIKNNTAAGPDGITKPALLEWDPTGAKLAAIFSIWLTSGTLPGPFKKCRTTLIPKTDDPILLTQVAGWRPLTIGSVVLRLYSRILTHRLERACPINPRQRGFISSPGCSENLMILGGLIKRSWAKGERLAVVLVDFARAFDSVSHSHILEILRQRGLDEHIIGIVGDSYTDVTTTITVSGEQSPPIDMRVGVKQGDPMSPLLFNLALDPMIDTLERYGLGYRMGEQQITALAFADDLVLVSDSWEGMACNIRILEEFCRLTGLRIQPRKCHGFLIQKIQRARSVNLCKPWIVCGEELHMVGPEESVSYLGMKVSPWHGIMEPDPVERLCNWISSIGRSPLKPSQKVRMLNVYAAPRMTYQADHGGLGPIVLNVLDGMIRKAVKVWLHLPLCTCDGLLYSRCQDGGLGIVKLACQIPSIQARRVYRLWHSKEAITRVVTRRTVEAEEYRGMWLRAGGSEAGLPPLEDREEGAVQCTDTAGSVKPKNPVIPDWRRAEFLKWQNLTAQGVGVQVFGGDKNSNHWMANPETLGSKERHYIAGLQLRANVYPTREALSRGRPDLPKVCRQCLAGTESCAHILGQCPAVKDSRIRRHHKLCDLLASEAESAGWTVIREMCCRTRAGALRRPDLVFVKTGFALVVDVTVRYEMAYDTLMGAAAEKVARYTPITPYVAMTLKARRVKVFGFPLGARGKWPGSNDRLLKAMGVGGGRRKQLAKLFSRRALLYSLDVLRDFYRAEGETGDLDDESVDDHL

SEQ ID NO: 1464 - protein, 1298 aa, synthetic construct
  source 1..1298: note = Description of Artificial Sequence: Synthetic polypeptide
  VARIANT 129: note = Any amino acid
  VARIANT 184: note = Any amino acid
  VARIANT 218: note = Any amino acid
  VARIANT 259: note = Any amino acid
  VARIANT 369: note = Any amino acid
  VARIANT 370: note = Any amino acid
  VARIANT 402: note = Any amino acid
  VARIANT 721: note = Any amino acid
MSRRPGKSNEPPVRSRAMGLTTLSGTKTSNSGAQGPSTSAPMQNMAGGFVCDCGRSYALKTSLARHKKECGKNNAECRWCGTRFNTLAGTRQHERKAHFVQYQSDLAKALPQPESELMEKIAIVEARSXNGIFYKEMMASTGLTHQQVRSRREKPEYKGFLERARRSLAQTNIRAGSISPASTXAGSLESASPKAGCSSSASPGPTTRSRAPTKGVPXRSSNSARIVVEAQVHTRAPPNTGETEVALRESRRTVPRLGXNPSRPCGISPLMAIAIDEDSVLGGLRVQAGPSPTAVHSVEAFPGTSSMTPMETDRVHNKSGIDPILEHNGTRQVRREESSTREDPVEQWSPNYPKTPVTMPNITTTADAXXTSYNRTPQTLPGNRRRRSRSLPPVQRKSASDXLESVDSLGPWAVFLQDQVDAGSLSGNDSLADLVRVALTKSDRGVLNDAVNRYLAQRAESLRIRKRGSKGKRKSKTGRHYGQTTSGSGQRAALFKKHQDLFLKNRRGLAETILSGKEDFGPRPEPPVTSVEEFYGGIFESPSPPDNEPFEVRATGVEDPPPLTSPWTKRTLRSPCYWRRRPPPTYITMDEIKAARAGWQISAPGSDQIPVAAVKTMSELELAILFNIILFRNVQPSAWGVLRTTLVPKDGDLRNPANWRPITISSALQRLLHRVLAARLSKLVSLSSSQRGFTEIDGTLANALILHEYLQYRRQTGRTYXVVSLDVRKAFDTVSHCSVSRALGRFGIPSVIREYILATFGAQTTIKCGSVTTRPIRMLRGVRQGDPLSPVLFNLVMDELLEKVNEKYEGGSLQSGERCAIMAFADDLILIADRDQDVPAMFDDVSTFLERRGMSVNPAKCRALIAGAVSGRSVVRTGSSYKIHNTPIPNVDALDAFKYLGLEFGHKGVERPTIHNLSVWLNNLRRAPLKPDQKCLFIRQYVIPRLLYGMQNPQVTSRVLREADRLIRRHLKTYYHLNVHTPDSLIHASVSDGGLGIMELRKAIPRIFLGRLVKLLNKNKDSVLSSVLQSNRVRTLMGKLSTMAGEVPESTFWRNQIASGPLSKGLEQAAEDSASRLWISEKPSGWSGRDHVRAVQLRTGNLPTKAIPSVPVGQRRCRHGCACDESISHVLQMCPLTHADRIRRHDEVVKKVARHCTSRGWTVEVEPHIRSRCGRLFKPDLAVHQPGGAIVIADVQVSWDSESLTVPYERKRAKYDVPQFHQAAQHAWPGKALTFAPVIVGARGIWPRINNDRSAALQIPPVVRRACVNSVVKWGSSIHATFMRSVWANRLNPRPLRA

SEQ ID NO: 1465 - protein, 1243 aa, synthetic construct
  source 1..1243: note = Description of Artificial Sequence: Synthetic polypeptide
  VARIANT 40: note = Any amino acid
  VARIANT 71: note = Any amino acid
  VARIANT 84: note = Any amino acid
  VARIANT 347: note = Any amino acid
  VARIANT 495: note = Any amino acid
  VARIANT 503: note = Any amino acid
  VARIANT 572: note = Any amino acid
  VARIANT 724: note = Any amino acid
MGSWIVNFVSVATQTGEFPVDTARRAPVPVTSYPESECHXPLPLTFCNSDVTIWGGVRPEPVDCLGDLPEXYDALPGVAGPREXVGGSPPGEGVRSPGIASPSGTAVQHDFGSPILVPGAEAAEVSTPVVKVPQDHPACPCCGTRVVKVTALSEHLRRAHGRKRVLFQCSRCGRMNEKHHSIACHFPKCRGPPVEEGPLGAPEWCCEECGQKFNTKSGLSQHKRSVHPLTRNVERIEAARPKGKGKRGAHKGCWTEAEVAQLIELEGRFKNQRFINKLIAEHLPSKSAKQISDKRRQLAAATKTSSPEKRVTSSTSGESSPEVEKVEGIKREYRRRVGEWLCAGSLXDQTSFQKILEDVESGSEIVTGPLEELASFARGKLAAARVRHHRKHPAEAVPAREEQRWMKRRVGRRGLYLRFQRLFALDRRKLAGIILDDVESIKCPLPMEEVADVFRRRWEEVAPFTGSGSFRSLGKADNGAFKPMISAKEVMKNVXEMSRRSAXGPDGLSLRDLMKIDPQGSRMAELFNLWLLAGRVPDQVKAGRTVLIPKSADPGKIGNIDNWRPITIGSVXLRMFSRILSARLRRACPINRRQRGFIAAPGCSENLKLLQALIKSAKRDHRTLGVVFVDLAKAFDSVNHQHIFQVLVQKGVDGHIIDILRDLYTNAGTYLESGSQRSGFIKILRGVKQGDPLSPILFNLALDPLLCRLEDRGLGYKYGDQQIXSLAFADDLALLSDSWEGMQQSIRVVEEFCQRTGLRVQAPKCHGFLIRPTKESYTINDCDPWTIADMQLDMIDPGSSEKYLGLGIDPWIGLSRPELSEVLTRWVKNIGGAPLKPLQKVDILRSYALPRLLFIADHAGLSATCLHSLDLSIRSAVKGWLHLPPSTCDAIIYVSYKDGGLGLPRLASLIPNVQARRLVRIAQSEDDVIRSVVLQEGIQEEIRKVWISAGGRPEKVPSVTGEFPVMEAQAADEALSEWERRAPRTIYPIPCKWRKREMENWTNLKSQGHGIRNFENDRISNDWLLHYGRIPHRKLITAIQLRANVYPTREFLARGLGEGAPRGCRHCPAEWESCSHIIGYCPAVQEARIKRHNDICGVLAEEARKLGWVIFIEPHLRDNTNELFKPDLVLVKGSCAKVVDVTIRYESGLTTLSDAAAEKARKYQHLAGEVRALTSATTVDFLGFPIGARGKWYVGNNGLLSDLGFSTSRVVRIARALSKKALLSSVDIIHIFASRARQAQTSE

SEQ ID NO: 1466 - protein, 1085 aa, synthetic construct
  source 1..1085: note = Description of Artificial Sequence: Synthetic polypeptide
MSNRLANTAAAGGVPEKTSGTLDIPGQPSSSGEKRAISYPGPFGCNSCSFTSTTWLSLELHFKSVHNIRDFVFLCSKCKKSWPSINSVASHYPRCKGSVKAAVVPTSLANTCTTCGSSFGTFSGLQLHRKRAHPDVFAASCSKKTKARWSNDEFTLLARLEAGLDPACKNINQVLAERLMEYNITRGVEMIKGQRRKDQYKALVRQLRSNSETQQCVGLAGSMDSNVPANDTSSSVASEVSITYPEYGAVMSCDLIKEATGMAIVDINELQSNLRKAFLSGRKLPMKFHGARETAQKKMANPRVAKFKRFQRLFRSNRRKLASHIFDKASLEQFGGSIDEASDHLEKFLSRPRLESDSYSVISGDKSIGVAHPILAEEVELELKASRPTAVGPDGIALEDIKKLNTYDIASLFNLWLKAGDLPASVKASRTIFLPKSDGTTDISNCRPITIASAMYRLFSRIITRRLAARLELNVRQKAFRPEMNGVFENSAILYALIKDAKVRSREICVTTLDLAKAFDTVPHSRILRALRKNNVDPESVDLISKMLTGTTYAEIKGLQGKLIPIRNGVRQGDPLSPLLFSLFIDEIIGRLQACGPAYDFHGEKICILAFADDLTLVADSAAGMKILLKAACDFLEESGMSLNAEKCRTLCITRSPRSRKTFVNPAAKFIISDWKTGISSEIPSLCATDTFRFLGHTFDGEGKIHIDTEEIRSMLKSVKSAPLKPEQKVALIRSHLLPRLQFLFSTAEADSRKAWLIDSIIRGCVKEILHSVKAGMCTDIFYIPSRDGGMGFTSLGEFSLFSRQKALAKMAGSSDPLSKRVAEFFIERWNIARDPKVIEAARRVYQKKRYQRFFQTYQSGGWNEFSGNTIGNAWLTNGRARGRNFIMAVKFRSNTAATRAENLRGRPGTKECRFCKSATETLAHICQRCPANHGLVIQRHDAVVTFLGEVARKEGYQVMIEPKVSTPVGALKPDLLLIKADTAFIVDVGIAWEGGRPLKLVNKMKCDKYKTAIPAILETFHVGHAETYGVILGSRGCWLKSNDKALASIGLNITRKMKEHLSWLTFEIIFITQISRIYNSFMKK

SEQ ID NO: 1467 - protein, 1086 aa, synthetic construct
  source 1..1086: note = Description of Artificial Sequence: Synthetic polypeptide
MCILGGLTSHSREGGLSRGSSQLKTVKPQNEEDNGTTQLKAGSADSFPRPSGDLNPEEPLSIDICPVCFRQMKSYLGVRVHMQKMHLEEYNASIPDPVVSHTRWSDEEAAQLAFTEAKIEVDKLLPRGKGINKFLLELLPGRTLESIKSHRKRQSHKDLVRKYVKEFVDTLAADNDDDTIICQDNGDIFNDPIVGATDSQSETETVADPAEFKTFIELADDPTKPKVVAKLRNLIKDKPKSEILGSDILVRILRRTLHGLPVEDELDQYLEVYFTGKIKQRRSKTQTALSKKQIKQRDYGRLQELYSRSRKRCANEILNPTSMSGGFGHQELSEFWTKTFGPDEQPTLGEVEIIPKENCWWDIFSPISSDEIKASYPSIGKAAGPDNFSAYQLRKVPVWHLECLYNIFAFYKDIPSRLKDAKTILIPKKDNAESPGDFRPITLSSIITRHFHKILATRVNNFVRFHPMQRGFIQSDGCLENTALIQTVIREAKVRRKQVHITFCDVRKAFDSVRYDSIIAAIAKKGAPGSFIMYLSNLYRGNKTTLLTAGGETRITPTRGVRQGDPLSPILFNCVMDQILTALPSRTGFTLSAGDESVNVNCLAFADDIILISKTKNGHQELLDVTQRILKENGLDLNPDKCCSLSLIPHSKTKKIKVVRADFVVNGVKVRSMSIGDSTCYLGVSINVTGQVAPVKMYQALCEKLDSAAIKPHQRLYILKHFVITKMFHPLILSTIAAHKIKNLDLISRRYVRKWLHLPHDCGSGMIHAKVSDGGLGVPLLFRTIADLKVRRKEKLQVHENPIFRILAKLSTVSKELENCKKIASKTTDIQEKTFKEMLATYDGLSLKEARAVPEVHKWVDSYDKRYKFAGRDFVQVIQARFNALPTRSRVWRGRGADEKSLRCRAGCNARETLNHVSQSCFRTHRVRTARHDKILDFICERLDVVGVKYVREKPISFPGKKLIPDLIVENTDQALVLDLQIVGDNSELPLDERGKNKVIKYNCSEMQELYKRKKKTLAVKALTLHYKGLMAPETSNILRSFGFKSKDLEKMAYMALFGTVAAWGIFNRSTETMRSVANWPRPEEL

SEQ ID NO: 1468 - protein, 1054 aa, synthetic construct
  source 1..1054: note = Description of Artificial Sequence: Synthetic polypeptide
FERRSNSWGYQNLEPSNVGQDMNTVPRINNTTTTPATSRPGDQPREAIAVVNLAGEIPCAVCGRLFNTRRGFGVHMSHQHKDELDTQRQREDVKLRWSEEEAWMMARKEVELEASGNLRFPNKKLAEVFTHRSSEAIKCFRKRGEYKAKLEQIRGQSTPTPEALDSITSQPRPSLLERNHQVSSSEAQPINPSEEQSNWEIMRILQGYRPVECSPRWRAQVLQTIVDRAQAVGKETTLQCLSNYLLEVFPLPNEPHTIGRSNLRRPRTRRQLRQQEYAQVQRRWDKNTGRCIKSLLDGTDESVMPNQEIMEPYWKQVMTNPSTCSCENTRFRMEHSLETVWSAITPRDLRENKLKLSSAPGPDGITPRTARSVPLGIMLRIMNLILWCGKIPFSTRLARTIFIPKTVTANRPQDFRPITVPSVLVRQLNAVLASRLASKVNWDPRQRGFLPTDGCADNATLVDLILREHHKRWKSCYLATVDVSKAFDLVSHQAIIKTLQAYGAPTNFVSFIEEQYKGGGTSLNGAGWSSEVFIPARGVKQGDPLSPLLFNLIIDRLLRSYPREIGAKVGNTMTSAAAFADDLVLFAETPMGQTLLDTTLGFLASVGLSLNADKCFTVSIKGQAKQKCTVVERRSFCVGERECPSLKRTEEWKYLGIRFTADGRAQYSPADDLGPKLLRLTRAPLKPQQKLFAHRTVLIPQLYHQLTLGSVMIGVLGKCDRLVRQFVRRWLDLPLDVPVAYFHAPHTCGGLGIPSIRWIAPMLRLKRLSNIKWPHLEQSEVASSFIDDELQRARDRLKAENVQRCSRPEIDSYFANRLYMSVDGCGLREAGHYGPQHGWVSQPTRLLTGKEYLHGVKLRINALPSKSRTTRGRHELERRCRAGCDAPETTNHILQKCYRTHGRRVARHNSVVNAVKRGLERKGCVAHVEPSLQCDSGLNKPDLVGIRQNHIYVIDVQVVTDGHSLDQAHQRKVERYDRADIRSQMRRFFGVTGEIEFHSVTLNWRGIWSGQSVKRLIAKDLLIAEDTKLISVRAVNGGVTSFKYFMYCAGYTRS

SEQ ID NO: 1469 - protein, 1253 aa, synthetic construct
  source 1..1253: note = Description of Artificial Sequence: Synthetic polypeptide
RPQTKLMTDKLKFSSQLARGLAKQRAMDGARVGDPPITVRPTETDLCNTEGSWGRRPMKLLFVSVSTQTQNEDALWASDVAKPMASRSALKMTSIPSMTFHNSSLEKEEEMNYDFYEQIKSLVESDDSSDDFTEDDEDVEESFLDISAEEPVLGKFPIDTKGTITVVLPSLEYICVICKQHMGKASELVAHFNIKHRDIPLVFKCAKCDKTNSNHRSIACHAPKCGGIKLTEESLPMVCECCQARFATLSGLSQHKRHAHPVTRNEERIKDGIKGTSQRGVHRSCWSLKEVEQLALLELQFQGKKNINKIIAEALGTKTNKQVSDKRRDLSKKTGAPMSDSLHFSSRPLETLSPPPNVTTGTSSILAQAAERLTNENSGTLEKPAMEAIKAWLNGEGQHDALVETATALMLCPMRLVKNKGKRSKPENDIIKPRILPTRSWMKKRAEKRGSFMKHQKLFFKNRSLLASLVLDGTERHECRIPNADVYRFYCEKWEKVLPFNGLGQFKSSGVANNEYFEPLISVEEVQTAIRAIKPTSAAGPDGLTRAAICAADPEGRTLTALFNAWMITGIIPKELKKNRTILIPKVMDDEKLKELGNWRPITIGSMILRLFSRIMTARLARACPLNPRQRGFIAASGCSENLKVLQDLMRHAKKLHRPLAVMFIDIAKAFDSVSHAHILWVLRHKKVDEHVVGIIQNAYDRCTTSFKSNGESTREISIRVGVKQGDPMSPLLFNLAMDPLICTLESHGVGYSIDTDHVTALAFADDLVLVSESWVGMAANLAILESFCGLSGLEVQARKCQGFMISPTKDSYTVNNCDPWTIKNKDVHMIQPDESTKYLGLKICPWTGIIRSDLHVQLKTRISKIDEAPLKPTQKVELLNAYALPRLLYPADHSDCKQSTLRVLDQEIIKAVKGWLHLPASTCDGLLYARARDGGLAILKLENAIPSVQVRRLQRIANSSDAIARNIASSQGVEEEYRSLWVRAGGDSEAIPTFFLRGSESKEPVYPRPCDWRKRESRRRCEKPVQGRGIVNFAQDRISNAWLGPRCGFKQCFFIAALQLRANIYPTRESINRGRDGASRSCRKCSARLESLSHILGQCPAVQKFKDCATQTEAEMVPHGPAGNALPGWSLSRTFLVNVPQYKNSRIARRNKISDILADEAARLGWWVYKEPRFTSEAGELRKPALVFAKGEEALVIDVTVRFELSRKTSSEAASHQVAYYTPPCDQVKVLTKASNVTFFGFQVGARGKVAP

SEQ ID NO: 1470 - protein, 1127 aa, synthetic construct
  source 1..1127: note = Description of Artificial Sequence: Synthetic polypeptide
RKELVTIKNLFEESGATAPAPVPLEVAVEVHQSSSVPEITDESTTTQEGSYSEPPIHRCENCGREFRTRAGVQQHRRKAHTNEFMEEKEKAAPTKKLRWTDEEKEILIESEIKIIKEGSLKEQHEINKILASRMPGRSQDGIAKIRQKQEHKAEIQRRLHGTVTTNETRGNRTSEITEPIRSLPINTKTWSEDEMKRMLAEEVKLRTKNEKDINKKLAEIFPNRTMGSIKSKRTKDKDYQDLVKLTMQTISENPDNETDFNTSNTENNSTDAEKEVKNYLNMLLLTINEEEWLTSTLKEAATLALQGKKTEASEKLNEYASKTLFPGLKITNQTRKREKKISKRETRRQEYAEIQKLYKKNISSAAEKAINGKWSIKPEEEYHNNKDLIKAWKPILEAPPFSDCRPIENIKEMDYALMEISTAEIFLAIRAMGKTAPGPDGIKYSKLKKNIQSMAILFNTCLLTSFLPLPLKIARTILIPKQENPGILDYRPLTIASVVTRVFHSILAKKLDNNAQLSQRQKGFRKCDGVAENIVILETILTNSRSEKRPLCMAFVDLRKAFDSVGHESIIRGAKRVGVPPMLLEYISSSYQNASTNLFGEILNSRRGVRQGDPLSPILFNFVIDEALENLNRNIGYLLKEEKVSCLAFADDIVLIAETKGGLENHIEKLLEKLNGAGLELNASKCATLMVMKNGKEKSTYISTKAIKIKENDIPTMKATETYKYLGLQMGFKAREQNANEVITEGLENITRAPLKPQQRIHILRDFLIPRLIHKLVLGRVAKKSLKRIDQNIRKKVRNWLHLPKDTTAAFIHADAGDGGLGVPALEHTIPLLKRERITNLRKSNDPVTKECLRMEYTKQVLGKWSRPTKIGETLATNKSQLKEAFRKQMLITLDGKGLKDHHETPTIHKWIRRGENMTGKQFITAVKIRGNLVATKSRNSRGRPEQEKLCEAQCGRPDSLGHILQGCWRTHGMRVERHNNICRRIKAIMKGKESEVVEEPRLQTNEGLRKPDLLICHKGKIIICDAQVVADSSNCSLESENQRKIDYYKKDSVVSEARKLIGRVDEDIIIMAVTFNWRGAISKTSIRDLDMLLDIKSKEVIKMSRKIIRDNSIMVEMHRNRTEKRR

SEQ ID NO: 1471 - protein, 1089 aa, synthetic construct
  source 1..1089: note = Description of Artificial Sequence: Synthetic polypeptide
  VARIANT 546: note = Any amino acid
  VARIANT 551: note = Any amino acid
MKSRSFRRIGDCAAGSSRRGVRLTGKAGREGRFAASPHLSPRYLAGSVSGNVPSVPPGPGLGAGAPAFAAGRNADGGPAQNPCPYCARSFTTANGRGLHIRRAHPDEANNAIDIERIHARWSHEETAMMARLEAGAIQRGGVRFMNQFLVPRMPGRTLEAVKSKRRDATYKALVQRFLQAPQINLPELRDGDAPRQPDPQQENPPEPPSFDGAIRGAVADLVGGVDWQRLGFQGDRLCNIARRACDGGDVSGQLLGWLRDVFPVKRVSTRGDQSDLDVDGALVSRRTARTREYARVQELYRKEPKACLARILGDRREGANRAPNRDPAFIDFWRGVFSEASAEVEGWAEEVSDHGELARRVWDPISVEEVGRSRVRNGAAPGPDGIAVSVWNKLPPEAAALLFNVLLLGRCLPAELTRTRTVFIPKTDAPRTPADYRPISIASVVARHFHRVLSARVQRIPDLFTKYQRGFLSGVDGIADNLSVLDTMLTMSRRCCKHLHLAALDVSKAFDTVSHFAIVRACRSIFGSAETVLEEGGRRHFVQVRXGVRQXDPLSPLLFNLVLDRALKRLSTDVGFRLTDATKVTALAFADDVVLCATTARGLQTNLDVLEAELRLAGLLLNPNKCQALSLVASGRDHKVKLVTKPTFKVGQNTIHQVDASSIWKYLGIQFRGSGMCGCGSEGVAAGLKRITCAPLKPQQRMHLLRVFFLPKFYHAWTFGRLNAGVLRRLDVVVRTSVRTWLRLPHDIPVGYFHAPTKSGGLGIPQLSRFIPFLRLKRFDRLGRSAVDYVRECAFTDIADRKIRWCRERLSGIVDQVAGGRDALDAYWTAQLHQSVDGRALRESASVASSTQWLRCSTRAIPASDWLHYTAVHIGALPSRVRTSRGRRGGQDVSCRGGCLLDETPAHCIQVCHRTHGGRVLRHDAIAKRISADLMELGWIVTREVSFRTTAGVFRPDMVAVKEGVTVILDVQIVSPAPTLDEAHRRKVAKYRDRADLARYLAEAAVARGRAPPANIRFASATISWRGVWSAESVGSLRELGLSARHFDRYTTMALCGSWRNWVRFNASTASRMGRGRGDASPRRHENQQ

SEQ ID NO: 1472 - protein, 1123 aa, synthetic construct
  source 1..1123: note = Description of Artificial Sequence: Synthetic polypeptide
SGPATSTFGETKSRLCEPTSALGCRPGAVVIQWAQIHKEKRKRIVGWPLGHLGSPTSLKLRHPRLQAKRIVPVLAELMQCLCARHVSGRSPQKSAWAFTLEERTSACGVDAMFVCSTCQRSFATKIGLGVHVRRAHVEVANAAISVERVKDRWSEEERRIMAAVEVRGVLSGARFINEYIMSHLQTSRTLESVKGTRKNPKYKELVATLLEEARTSVREESPRSAVNDSATQPSGPSDTRSLRTEHLFTESTEPFEHRIRELIGDLEGVTDFRAELLVSIAEQQLQGDEVAESLTRWLGEVFKPENQQQQVQRKRRRQRKAPVSGQLPKWRERRRDYAAMQTLFHRNPSLAAGRVLDGKNESRPPDLPEMTAFWEPILTEQSAEHRAVGPASEKSELCSVWGPVEKEELLSSVPPLDTAVGPDGVTARQWRAVLPAVRALLYNIILKRGSFPASMLESRTVFLPKKQHSVNPADFRPISIASVVVRQLHKILAMRLRRTNLVDERQRCMDDGCAENITVLASLLDDARHGLKELHLVSLDCAKAFDSVSHHAIDATLKECGLPAGFVQYISRTYSDSSTRLEVGRNRSEPIKTNRGVRQGDPLSTLIFCLCFDRVARTLSPHIGYDLNNTRISTLLYADDAFLVSTTAPGMNILLRSVEESAGEVGLSFNTSKCSALSLIPSGKEKKMKVGTTPTFKTSQGFITQITPSQEWRYLGVDFQYSGPKKASRSLKIELERISKAPLKPQQRLLILRVYLLPRYYHHLVLSRTTLGHLRGLDLQVRAAVRRWLSLPRDIPIAYFHTTAKEGGLGLPAFETSIPCLMLARLRSMETSTCKAARAAVQGFWVQKRIHWATAALTKNGEALTCKADVDRWWASRLHKSVDGRELRECSGVGSSSTWVNSALNITGRDYVQYHHVRINSLPTRIRTSRGVRREGMEVTCRAGCQVTETAAHVIQSCHRTHGGRILRHNAVCKVLASGLRDKGWEVREEPKLRTRQGLRKPDIVAIKDGVARVIDAQVVSGSGPLDEAHETKRKYYSDNGDVTAAIARECNIAPSNVAYSSCTISWRGVWSPRSAADLLQVGLSKKLLGFITLRVLRGSHLNWTRWNKMTTMRVHHQRTGIG

SEQ ID NO: 1473 - protein, 1133 aa, synthetic construct
  source 1..1133: note = Description of Artificial Sequence: Synthetic polypeptide
MSSNEEGASDTGAPGPGVPVADVSAADGRATYDDHGMSTDYEKQTIELPLNGQIQCLWCHIEGRNQRFLQESQYLKHKDTQHPKGEIIWRCAACQKEFEKLHGCRCHLPKCKGRKEAKGVAKFKCDSCEESFLTQRGLSMHELHRHPAIRNLKRTQGTSRGNTRPINRASVWSKEETDLLIKLNERYKHLKQPNVALKEYFPDKTLKQISDKRRLLPVQEPEDVATTDETGPPPSDSSEESIYESATEDEGGGDMQQTAPNDSWKEPFIQSIRTNHLEEEDSLRKVEEAIERMAMNEGVTEQEVGTLLEQFVDSLTQSPTTERKGSRRKSQKTTKRKTTHNNRKKFLYAKHQELYKKSPRRLLELALSGESSSGREVVNLPEADSVGPLYKSLWGQIGPEKTHRNQPMCNNIDMSEIWTPIALESLVEKFKKIKSDTAAGADQIKKFHLRKKGALHVFAKLCNLLMLHRIYPAQWKTNRTTLIPKPGKSAEEVENWRPITIGSLLGRIYSAMIDRKLRSKIKQHIRQKGFTQEDGCKNNIAILSSALTKMKEDSGGIITIIDISKAFDTVPHGEISQSLMNKGVPSPICEYIQKMYIGCKTIIYCRDKKTLPVDILRGVKQGDPLSPLLFNLIIDPIIGTLDETTEGIKLENENISVLAFADDLVLLAKDKETADKQNRLINEYLDDLKMKVSAEKCTTFEIKRQNKTWFLGDPQLTLGQQRIPYADPEAAIKYLGTNFNPWRGLCKTSIKEIIDAARTVKQLKLKPHQKINLIRTYLLPRYIHKLVANPPPLGTLDLIDKELKTIIKEILHLHPSTTDGLIYTDKSHGGLGIQRVANIVKLAKLKHSILMTRSEDNAVKIALNGQEGMVKRYATSIGLQWPCGIEEIEETRKKLKRADTNKWKTLISQGQGIKEFFGDKTGNAWLYNPEMLRPSRYLDALKLRTNTYGTKAALHRAKRDIDINCRRCGVQVETLGHILGLCTHTKNKRIKRHDEICDLIAKNVSKEYVIFREPEVEVNGDRRKPDMVIKDHDKVYVVDVTVRYENNDSLNKAYKEKENKYKETAEIMRRDLKAKESRVLPVVIGSRGAVPRATIENLKVLGLQTKHALTASLIALRSSIEMANEFLDYDHTT

SEQ ID NO: 1474 - protein, 1279 aa, synthetic construct
  source 1..1279: note = Description of Artificial Sequence: Synthetic polypeptide
  VARIANT 81: note = Any amino acid
  VARIANT 111: note = Any amino acid
TFAPTHPMVRSGPCRKTKRPGSDYRESLIMDSGNNVASEPRGAVDVTSAAPIGAELNAEPCEGRNQRREAALSAQTRRRNXARRARNAQQADEPGDDEEIETHGPLTIRTXEPMEIVAIAKNPQACPKCLQGGTQLLCMGSWELSRHINKEHPSVDVTWVCGACQRRCTTLRSWSCHVLHCKGRQEPKDLPFKCEHCSLSFDSQIGLSQHERHVHPEVRNDKRAAEANKPKGKSGRRPSIWSDEDLLLIRELESEYHGARNINEKIAEHFPDRTGRQVSDARRRKDYAALRGRGGPQGPAEGVEAIEEVDEGEIPEGEELVATDGAALESGPPENGGSAPAEQVNAPALESSSQQDRECSPAVGSDEQIEDSSDDDEFSDALGEISLPEPLSVERTTISPPPRDDWKGPMRWEICNASEEAGSYANWVTGLQELVRNNALSEIGLDSLYDQLIQIMRHPSDDNEQDRLQLNARGPPRRGHRKNRRRRRLTAADRKRFAFARCQDLWNNNPKKLAELVIANDLSILQRRQAPGRTETQTLYNELWGRVGPNIEAPRRTEDPIPVSRIFTPITPQEIMGRIRRIKNDSAAGPDGVTKDDLRGRGVSIALSKLFNSILLAGYYPKAWRENRTTLLPKPEKDPADVKNWRPITISSMVSRVYSGLLDQRVRAVIKQCDRQKGFTEENGCFSNIQLLDDAVSNAKKAGGVITILDVSKAFDTVPHAVIQGCLEKKGIPETVAAYISSMYRDCSTAIRTRSGDVKIGMKRGVKQGDPLSPLIFNLVLEPLLERLQETSGVEIEGMNLSCAAFADDIVCFANTAPEAGRQLRMVADYLGRLDMSLSVSKCIAVEYVPHRKTWYTKNPGLEVNGNAVPSISPSETFKYLGAKVSPWKGLLEGFESDAFREVISRVQRLPLKPMQKVDLLQMYIFPRYTYGLITSPPAKAVLKTIDRIIRTRIKEILHLPESVSSSFLYTPRKQGGLGLLEVEKMVLIAALRNGLRARQSHDPVTRAAMNSNAADDRLKSYADALRLHWPLTTKELDTYKYQLRLSYAQKWAEQKWQGQGVEEFAQDPVGNSWLQRYDLLPASRYIDAIKLRTNTYPTRALMKIIDGRVDSSCRKCQGSSETLGHILGRCRYTKDKRISRHNEIKDLLKARLAKNHQVMDEPQITVRGQRFKPDLVVKTNEGRVHVIDVTVRYEHRTYLDEGRTEKIGKYRQILSTLRRDLHSNAEEVIPIVIGSRGAIPRETRKALSKLGIGKSDWLTISLIALRSSLEIVNAFMDD

SEQ ID NO: 1475 - protein, 1104 aa, synthetic construct
  source 1..1104: note = Description of Artificial Sequence: Synthetic polypeptide
MGEWPWVSWSLTVLVEKWRPFTILQPYPMPGQLRVDVYLPRKTSYLMDKNIYENTTSPGGGPLCGEKTHRSDVIIPPPGFAPSTDTASNTLGENVDASATTSSANPLSQEPGWCESCSKLFKSQRGLRVHQRSKHPELYHSQNQPLPRSKARWSDEEMVIFAREEIANRKIRFINQHLHKVFPHRTLESIKGLRGKNVRYARIMADLEAEMTSQPEAATSLCTETSENLASSNVLPQTRGWAENLVENIDTAHLANLGPLSQFEPGKPSSSTKEAINTEYNDWISKWLPSGAAHRERRANPPSTKLNARATRRLQYSRIQNLYKLNRSACAQEVLSGAWKVQSGELNLKEVQPFWEKMFRKESAKDRRKPKPTGEVLWGLMEPLTIAEVGSTLKSTTPSAPGPDKLTLDGVKRIPIAELVSHYNLWLYAGYQPEGLREGITTLIPKIKGTRDPAKLRPITVSSFICRIFHRCLAQRMETSLPLGERQKAFRKVDGICHNIWSLRSLIHNSKDNLKELNITFLDVRKAFDSISHKSLGIAAARLGLPPPLITYISNLYPNCSTKLKVNGKISKPIEVRRGVRQGDPLSPLLFNAVMDWALSELDPRVGVQIGEQRINHLAFADDIILVSSTKIGMVSSINTLSRHLAKSGLEISAGKEGKSASMAIVVDGKKKMWTVDPLPRFKVNSQKIPALSITQQYKYLGINIDAQGARNDAARILTEGLAELSRAPLKPQQRLYLLRVHLLPKLQHGLVLSSCAKRALTYLDKSVRSAIRRWLTLPKDTPTAFYHAKACDGGLGITRLEHTIPILKRNRMMKLTLSEDPVIMELVKLTYFTNLLHKYSNVKLLNSWPVTDKDSLARAEASMLHTSVDGRGLSNCSDVPRQSDWVTNGASLLSGRDFIGAIKVRGNLLPTKVSAARGRQREITCDCCRRPESLGHILQTCPRTWGPRISRHDSLLKRVRNQACLKNWTPIIEPSIPTNIGLRRPDLVLAKGNIAFLVDATVVADNANMQLQHEAKVEKYNNSDIKEWIKVHCPGVDEVRVTSLTANWRGCLYGGSASFLTEDLGLPKAELSLLSAKINEKGYYLWCAHYRGTARLWNRPLRS

SEQ ID NO: 1476 - protein, 1115 aa, synthetic construct
  source 1..1115: note = Description of Artificial Sequence: Synthetic polypeptide
WVTSPRRPRYVGPQKKKASDGNDGRAAARAEPTNPGGPDRADDDEGDVKFWCEFPGCDRFFMTRSGRGLHHKKGHPDWNDQRNLAGKQHRKEIWSEEERLLLAKKEAELAISGARFINVELRDFTARSLDAIKGQRKRPDYKILVEKFVRELRVRGIRQGVASRSQQARAMAVAGAPAATSSGAPPVATQPPPSGRVLRSQVVEAPAMEIPVAESEGDSSGDELFEDVEPVRLSDLPPDRFTIYFAGLEIPGTEDIYAHRLHTICLMTTWRTKEEVRLELGLFLKDLFPSKGSQERPERTNLPDPRNRIERRRGEYKKCQDLWRRNKSTCVQRILKEDLSQGECLPRELMEPFWNATFTQNPGTAPVLPPPTEVYSSVWEPIRPENIKGNYPPQNTAAGIDGLTVGDLKGVSREMLARIFNLFMWCGKLPEHLCASRTILLPKKPGAKVPGEFRPITVTSVLIRTFHKVLAERLKVVPLDPRQRGFRESDGCAENVMLLDMTIRYHHERRRKMFLALLDMAKAFDSVSFESMREVLTTKGIPTPFIEYFMTHLEDSFTVLQHGNWQSGKIHPTCGVKQGDPLSPPIFNFIMDEMLKRLPKEIGVNLDGLFVNAMAFADDLSLVANTEQGLQILIDEATSFLGLCGLRANPNKCVTLAIKTIPKEKKTAIDPSSHFRIGNAVIPSLKRTDEWVYLGIKFNSNGRLISDAKPKLIKDLELLTKAPLKPQQRLWALKVIVIPGILYRGTLGSSTAGYLRSLDCVIRAYVRRWLRLPGDCPNGYFHAAVADGGLGVHPIRYKAMVDRLARLRKLEKSAYITGPEAARYLQRQVSIAENRLRDGANRIMSDASMLREFLRELLYKSFDGRPLENSSKVPGQHRWVEEPTRFLSGADYMNCIRARIAALPTAARCARGRLKDKHCRAGCGNVETLNHVLQFCHRTHGTRIGRHDAVVKYVVGGLKKRGYAVKEEPKIVLQDVVYKPDMVATKEGKTLILDAQVLGDQRDMRLAHEDKLRKYGAPEFKRKIRSETGSATIKSLSVTLSWRGLWGPDSVKGLLEEGVILKKDLKILSTRVLIGALAGWRRFNERTSMATSGRREEVTTRMVRRWKRRERVGVG

SEQ ID NO: 1477 - protein, 1013 aa, synthetic construct
  source 1..1013: note = Description of Artificial Sequence: Synthetic polypeptide
  VARIANT 753: note = Any amino acid
MSGKSSKPRTVSSGSSSQETPPSGSNACDICGKCFMKPVGLSRVHPSQYHARLEKNQPKAKKFRWTDEDLYFLAKKEAELLHLGSIKFVNKELAEFFPEKSVDQIRGQRRSETYKQQVLSIHSELLKLQTVADSPPPSRIPAKEVSAWLDFFLALPKTKNKFSEDKLDQLIRTAQDGTLILDDLDLYLREVLVQPTSQGEKQAKLLPPPKSSREKRDREYARAQNLYRKNKTACVNAILDGNKKCENKIPDIDDFWKTIFESHSPPDAEPVCYVVDEEPTNIWSWISFFEMNHNYPDSSTSPGPDGVTARMLRSIPARVLNKLLNLLLFIEDLPAVFKCHRTVLIPKIDNPTSPGEFRPITISSIVVRQLNKIIAARVSEGVPINPRQKAFRQIDGCAENVFLLDFILRDAKTKIKSLSLATVDIKKAFDSVSHHSIFRAIRGARCPENLVNYIQNSYSGCTTQISVGGSISASKIPMNRGVKQGDPLSPVLFNLVINEIIRKLPASIGYPINSELSINCIAYADDLILVTNTREGLKLLLGLLNEELPKRGLELNASKCFGLSLTALGKLKKTHLCTSDQLDLHGTLIKNLTAEESWVYLGVPFSHIGRSKSFSPDLEALLNKLQKSPLKLQQKLFALRVYLIPRLLHGLVLSRVAIGELKIMDKLILKHLRVWLRLPKDTPLGFFYSPVKLGGLGIKNLRTNVLKCRKQRIERMLVSPDDVVRLVAESEIFLKETDKLKDLLTINGMCLDXRNVPRTGKNNKFWSERLYTSFDGKTLAYSEYFTQGGGWIREDKILQPAHVFAECIKLRINALPTKSRVAHGRPTKDRSCRAGCLDVQKVPTIETINHIAQVCPRTHGARIKRHDRLVQFLSLNLRKNPKRNVLVEYNFRTVAGIRKPDIIVIEDTRAVILDVQVVGDSSNLEMEYLEKSRKYSNDANFINALQKLYPTVTNLTFHAVTFNNRGLIAKSTVAALRMLGVPPRCIMILCVISLEKTLEVWRMFNQSTASARK

SEQ ID NO: 1478 - protein, 1016 aa, synthetic construct
  source 1..1016: note = Description of Artificial Sequence: Synthetic polypeptide
MSEESRPKQTASKRGAAVEKTMMSGTYVCTLCGRSFEKSVGLSLHTNRMHPEAYNKLKEAKKPVLKKARWSEEEVFLLAQKEAELSFIGGIKFMNIELHKIFPERELEGIKGQRKNPTYKAQVVSLLAEIRESKANDSSSSSSSSSSCDSASLGISNWLEFLLALPKTSNQFQEGRLDRLISDALRGVDVLENLDAYLLEVFAKPMAQNPCPKPPPPAKNSRERRDREYSRVQNFYKKNRSACINSILDGNTRSQNVIPGLTKFWTETFEKNSPPDDEAPDQFVADEPRDMYKWITFYEMSQDYLDSSTAPGVDGFSAKQLRSMSPRVLNKILNLLLLSENLPNSFKMHKTVLIPKIDDPKSPGDFRPITISPVLARLLNKILAARLSKLVPISQRQKAFLPVDGCGENIFLLDYILRSSKKSSKSVAMAVLDVKKAFDSVSHHSILRALNEAKCPINFINFVRNSYDGCTTKLTCGGTSFPDSVRMNRGVKQGDPLSPVLFNLIIDSAIRKLPDSIGYVIRDGLKINCLAYADDLILVASSRAGLKTLLNIVAEHLSLRGLDLNAAKCHGLSIIASGKAKTTYVSAADSLDLDGQPIKNLGVLDTWTYLGIPFSHLGRAEKVSPDLTNLLNKLQKAPLKLQQKLYAVRNFVIPRALHGLILSKTNLKELNTLDRAIRVFLRTLLYLPKDTPLGFFHSPIKSGGLGITCFRTSVLKCRLQRIARMRSSCDGVIQAVAESDIFADEYAKLRDLIRINGNVLDTTESIKRYWAQRLHSSVDGKTLAYMDYFPQGNLWMSEDKVSQRSYVFADCVKLRINAIPTRVRVSRGRPNKEMCCRAKCFDSQRMPAFESLNHITQVCPRTHGSRIQRHDKIAKFLFKNLNNCPSRSVLYEPHFVTVDGLRKPDIIIYDDSHMVVLDVQVVSDSANLEKEFECKAKKYANDVALRSAMLIKYPFIKSFSFVAATYNNRGLIAKSSVQVLRQLGLSPRSIMVSILICLEGTLETWRIFNQSTMNAH

SEQ ID NO: 1479 - protein, 1020 aa, synthetic construct
  source 1..1020: note = Description of Artificial Sequence: Synthetic polypeptide
  VARIANT 757: note = Any amino acid
MSGKSSKPRTVSSGSSSQETPPSGSNACDICGKCFMKPVGLSLHMSKVHPTQYHARLEKNQPKAKKFRWTDEDLYFLAKKEAELLLLGGIKFMNKELAEFFPEKSVDQIKGQRRSETYKQQVVSIHSELLKLQAVADSPPPSRIPAKEVSAWLDFLLALPKTKNKFSEDKLDQLIRTAQEGTPVLNDLDLYLREVLVQPTRQGERQAKPLPPPKSSREKRDREYARVQNFYRKNKTACVNAILDGNKKCENKIPDIDEFWKAIFESQSPPDAEPVSYVVDEEPKNIWSWISFFEMNRNYPDTSTSPGPDGVTARMLRSIPARVLNKLLNLLLFIEDLPAVFKCHRTVLIPKVDNPALPGEFRPITISSIIVRQLNKIIAARVSEGVPINPRQKAFRQIDGCAENVFLLDFILRDAKTKIKSLSLATVDIKKAFDSVSHHSIFRAIRGARCPENLVNYIQNSYSGCTTQISVGGSISTTKILMNRGVKQGDPLSPVLFNLVINEIIRKLPASIGYPINSELSINCIAYADDLILVANTREGLKLLLNLLNEELPKRGLELNASKCFGLSLTALGKLKKTHLCTSDQLDLHGTLIKNLTAEESWVYLGVPFSHIGRSKSFSPDLEALLNKLQKSPLKLQQKLFALRVYLIPRLLHGLVLSRVAIGELKIMDKLILKHLRVWLRLPKDTPLGFFYSPVKLGGLGIKNLRTNVLKCRKQRIERMLVSPDDVVRLVAESEIFLKETDKLKDLLTINGMCLDXRNVPRTGKNNKFWSERLYTSFDGKTLAYSEYFTQGGGWIREDKILQPAHVFAECIKLRINALPTKSRVAHGRPTKDRSCRAGCLDVQKVPAIETINHIAQVCPRTHGARIKRHDRLVQFLSLNLRKNPKRNVLVEYNFRTVAGIRKPDIIVIEDTRAAILDVQVVGDSSNLEMEYLEKSRKYSNDATLSMRINALQKLYPTVTSLTFHAVTFNNRGLIAKSTVAALRMLGVPPRCIMILCVISLEKTLEVWRMFNQSTASARK

SEQ ID NO: 1480 - protein, 1138 aa, synthetic construct
  source 1..1138: note = Description of Artificial Sequence: Synthetic polypeptide
MLRGTGNMNDKRDGSATADPTSALLGAVGDGSLVCNLCGLACKSRGGLSIHRRSKHATVYHAERQPAPRAKARWTNDEMILVARKQIASEKSRCSAVVEGMREAVPHRTFDAVKSLKTKNRNYTRILEQIRAECSEEEVIESGVLKDRTENVCVQTTSNVPGSAGRAASVELEGNIQVGHQLAQKTMAGNNSRKQPANHTNWAEFNIEEGNITLRKSKRKANGMPDATHRPGPPTVDSLKHPVCLLQGAADKRDEPHTVEQLYYNIEEGMPLAEEQQWSEKLFDAIDSSLLSVEVELGRIVPGCPDEETRQLIDREFLDFIHSYSREKPPQRGLAKSKPPPKGPKSLRRQQYRQLQRLWDKNRSAAAEQALTGKWQEVRTAAGVPLSLMEVPWREIFETPSTTDVREPAPAGPVLWQLLRPVTIAEVEDAISSKKSASGPDGVPCAALQTMGAASLAAHFNLWLLAGTQPKRLTECRTIFVPKEVNTHLPLHHRPITIGSVVVRLFHQILGKPMEAVLPLGSGQRGFRKGDGICQNIWLLHTLIRRSTDLLRPLKLVFLDVKKAFDSVSHESLLIAAKRLGVPGPLLTYINELYSRSETVFEVGGESSGSVKVSQGVKQGDPLSSTLFNCVIDWAVSDLDPHIGVLLGESRVSFLAYADDLVLLSETEAALTSQLNSIEKSLAHCGLKLSTGDSGKSASLNIVIDGKAKRWVVNPTPFLRASGGEIRSLVANETYKYLGINIGAQGVKAAEYNAFKEALDNLSRAPLKPQQRLFLLKTYLLPQLHHSLVLSRTTGKLLNSLDALVRKAVRGWLKLPHDTHRAFFYAHQADGGLNVPSLYHLIPLLRRSRYERLTRVEDPEIREVSRTDYFKRVLGAAAAATTVAGHRIDSKVTLRLAWREALYASADGRGLSQCPLVPEVHSWVTDVSGLQTGSQYISAVRLRGALLPTAVRKSRGRGGVNSNCDCCGRGQPEFLGHVLQTCPRTWGSRISRHNHVLSLIAKACRSRRWQVLEEPIIQTPAQLLKPDLVIWNHQAAYVVDVSVPGDNTPLSTCHNRKVAYYSGESVREWVRSKTGHNPTVSSVVINWRGAMAKESYRLLTKDLRLAKTLPRLLVLRVLEGGHGIWLNFHRSTFAVGVT

SEQ ID NO: 1481 - protein, 1148 aa, synthetic construct
  source 1..1148: note = Description of Artificial Sequence: Synthetic polypeptide
MPVSTGAETDITSSLPIPASSIVSPNYTLPDSSSTCLICFAIFPTHNILLSHATAIHHISCPPTPVQDGSQQMSCVLCAAAFSSNRGLTQHIRHRHISEYNELIRQRIAVQPTSRIWSPFDDASLLSIANHEAHRFPTKNDLYQHISTVLTRRTAEAVKRRLLHLQWSRSPTAITTSSNNHTTTDIPNTEARYIFPVDLDEHPPLSDATTPDASTHPLPELLVILTPLPSPTRLQNISESQTSHESNRNSMHTPPTYACDSDESLGVTPSSTIPSCFHSYRDPLAEQRSKLLRASASLLQSSCTRIRSSSLLAFLQNASTLMDEEHVSTFLNSHGEFVFPRTWTPSRPKHPSHAPANVSRKKRRKIEYAHIQTLFHHRPKDAANTVLDGRWRNPYVANHSMIPDFDCFWTTVFTKTNSPDSREITPIIPMTPSLIDPILPSDVTWALKEMHGTAGGIDRLTSYDLMRFGKNGLAGYLNMLLALAYLPTNLSTARVTFVPKSSSPVSPEDFRPISVAPVATRCLHKILAKRWMPLFPQERLQFAFLNRDGCFEAVNLLHSVIRHVHTRHAGASFALLDISRAFDTVSHDSIIRAAKRYGAPELLCRYLNNYYRRSTSCVNRTELHPTCGVKQGDPLSPLLFIMVLDELLEGLDPMTHLTVDGESLNYIAYADDLVVFAPNAELLQRKLDRISLLLHEAGWSINPEKSRTLDLISGGHSKITALSQTEFTIAGMRIPPLSAADTFDYLGIKSNFKGRCPVAHIDLLNNYLTEISCAPLKPQQRMKILKDNLLPRLLYPLTLGIVHLKTLKSMDRNIHTAIRKWLRLPSDTPLAYFHSPVAAGGLGILHLSSSVPFHRRKRLETLLSSPNRLLHKLPTSPTLASYSHLSQLPVRIGHETVTSREEASNSWVRRLHSSCDGKGLLLAPLSTESHAWLRYPQSIFPSVYINAVKLRGGLLSTKVRRSRGGRVTNGLNCRGGCAHHETIHHILQHCALTHDIRCKRHNELCNLVAKKLRRQKIHFLQEPCIPLEKTYCKPDFIIIRDSIAYVLDVTVSDDGNTHASRLLKISKYGNERTVASIKRFLTSSGYIITSVRQTPVLTFRGILERASSQSLRRLCFSSRDLGDLCLSAIQGSIKIYNTYMRGTQRLNE

SEQ ID NO: 1482 - protein, 1031 aa, synthetic construct
  source 1..1031: note = Description of Artificial Sequence: Synthetic polypeptide
MSQKRRPEKAVPDEGATAHDVAQPDKSKCSVCGETFKGPASVTMHMVKKHPVEFNELKMAKKPVPKKVRWSEEEIFQLARTEAELTLQGVRFINVELQKIFPAREIEGIKGQRKLAKYKELVKDQLDEIGRAPNPPEQEIGEDVPSPFKAWLELLLALPKTPNDFLEHKLDNIIVQALKEDVNSDQVFNDLNSYLKLILEPSGRAKSVPGEIIHGDPSGSAKTSVTKAPKPATVSSSRKKRRDAEFARIQRLYRKNRTSCINTILDGNTREHEAPKNMEGFWREIFERESPDDPDDPDIFLEEEASDIWKYISFYEMCNLYPPPSTAPGPDGFSSKDLRRMTPRVLNKILNLLLHLRDLPQILKSHRTVLIPKTDLPTKPGDFRPITISNILVRHLNKILANRVSHLIPINERQKAFLPIDGCAENIFTLDFILHHARTKIKSLSMAILDISKAFDSVSHHSIFRALREARCPIGFIKFIENCYGGCFTKLFCGGVKYPSEVSMNRGVKQGDPLSPVLFNLVIDGLIRQIPSALGFNVSDQVKVSCIAYADDLILIATTRAGLKTLLDLTNSYLAKRGLSLNPDKCSALSIVASGKQKLVYIASSEHFDLAGQKMRNLNVGDSWRYLGIQFSHLGRAEKVTPDLTCLINRLQKAPLKLQQKLYALRIYLIPRLIHGLTLSKTNLGELKTLDKLIRKYIRAWLHLPDDTPMGYFYTPLKAGGLGLPSLRLVILNNRLERILRMKASQDIIVRTIAESETLGVEIRKLHDLLSIDGTILDTSVKIHSFWAERLYSSYDGKCLCNSANFPPGNKWIGEDSLNQRSHIFADCLKLRINALPTRSRTARGRPLKDKPCRAGCRNSDGVKVIETLNHITQVCERTHGARVKRHDRLVDFAVKGLQRPHRVVLKEPHYKTVNGVRKPDIVIKIPDHTYICDFQVVSDTSCLELEFRKKALKYAEDKGLCDQLTRDHPGELSFTAITFNTRGLIAKSSVTALRKLGMPPRSIMTLQKICMEGSLEIWRIFNQTTAMARN

SEQ ID NO: 1483 - protein, 1056 aa, synthetic construct
  source 1..1056: note = Description of Artificial Sequence: Synthetic polypeptide
FERRKDPWGYRPPGTLKQIGATENNEPRNLNRFVRGESTASSLESTQFGTSAEVNLAGRVPCTICEMTFSSKRGLGVHMSHRHKDDLDAQRLRVDKKARWSEEETLMMARKEVELAASGVRFLNKKLAEIFTHRSADAISSYRKRSEYKAKLEQIRGQSVPTPEAEEINTTQRRPSNSEQNRRVPRSEGGPIAPTEQTNNEILRVLQGLAPVVCLPRWRAEVLQNIVDNAQVSGQETTLQSLSSYLMEIFPPRNEPHILTRPRTEPRNMRQRRRQQYARVQRNWDKHPGRCIKSLLEEDDESVMPNQEVMEPYWRRVMTQPSSSSIKRDMFNMEHSLERVWSAVNQRDLRATKVKLSSSPGPDGITPKTARSVPEGIMLRIMNLILWCGNLPYSIRLARTIFIPKKATANQPQDYRPISVPSVIVRQLNAILASRLSAAINWDTRQRGFLPTDGCADNTTIVDLVLREHHKRFKSCYIGTLDVSKAFDAVAHEAVYNTLASYGAPKGFINYLRKAYEGGGTMLAGNGWVSEAFIPARGVKQGDPLSPILFNLVIDRLLRSLPSEIGAKVGNAMTNAAAFADDIVLFAETPMGLQKLLDTTVCFLSSVGLTLNTDKCFTVSIKGQAKQKCTVVERRSFLIGGRECPSLKRTDEWKYLGIKFTAEGRARYDPAEDLGPKLLRLTRAPLKPQQKLFALRTVLIPQLYHKLTLGSVTIGVLKKFDKLVRYTARKWLGLPVDVPVSFFHAPHKSGGLGLPSLRWTAPMLRLKRLSNIKWPHLERSEVASSFVEEEMRRARDRLQAGSEELLTRSQVDSYLANRLHMSVDGCGLREAERFAPQHGWVSQPTRLLTGKEYTDGIKLRINALPSRSRTTRGRHELERRCRAGCDAPETTNHILQQCYRTHGRRIARHNGVVNFLKRGLERRGCVVHVEPSLQGETGLNKPDLVAIRQNRIYVIDTQIVTDGHSLDQAHQRKVGKYDTPDIRTNLRRSFGAFDIEFHSATVNWRGIWSGQSVKRLIASDLLSSGDSNIISVRVISGGLWSWRQFMYLSGYTRDWT

SEQ ID NO: 1484 - protein, 1022 aa, synthetic construct
  source 1..1022: note = Description of Artificial Sequence: Synthetic polypeptide
MTTRPSVDIFPEDQYEPNAAATLSRVPCTVCGRSFNSKRGLGVHMRSRHPDELDEERRRVDIKARWSDEEKWMMARKEVELTANGCKHINKQLAVYFANRSVEAIKKLRQRGDYKEKIEQIRGQSALAPEVANLTIRRRPSRSEQDHQVTTSETTPITPFEQSNREILRTLRGYSPVECHSKWRAQELQTIIDRAHLEGKETTLQCLSLYLLGIFPAQGVRHTLTRPPRRPRNRRESRRQQYAVVQRNWDKHKGRCIKSLLNGTDESVMPSQEIMVPYWREVMTQPSPSSCSGEVIQMDHSLERVWSAITEQDLRASRVSLSSSPGPDGITPKSAREVPSGIMLRIMNLILWCGNLPHSIRLARTVFIPKTVTAKRPQDFRPISVPSVLVRQLNAILATRLNSSINWDPRQRGFLPTDGCADNATIVDLVLRHSHKHFRSCYIANLDVSKAFDSLSHASIYDTLRAYGAPKGFVDYVQNTYEGGGTSLNGDGWSSEEFVPARGVKQGDPLSPILFNLVMDRLLRTLPSEIGAKVGNAITNAAAFADDLVLFAETRMGLQVLLDKTLDFLSIVGLKLNADKCFTVGIKGQPKQKCTVLEAQSFYVGSSEIPSLKRTDEWKYLGINFTATGRVRCNPAEDIGPKLQRLTKAPLKPQQRLFALRTVLIPQLYHKLALGSVAIGVLRKTDKLIRYYVRRWLNLPLDVPIAFVHAPPKSGGLGIPSLRWVAPMLRLRRLSNIKWPHLTQNEVASSFLEAEKQRARDRLLAEQNELLSRPAIEKYWANKLYLSVDGSGLREGGHYGPQHGWVSQPTRLLTGKEYMDGIRLRINALPTKSRTTRGRHELERQCRAGCDAPETTNHIMQKCYRSHGRRVARHNCVVNRIKRGLEERGCVVIVEPSLQCESGLNKPDLVALRQNHIDVIDTQIVTDGHSMDDAHQRKINRYDRPDIRTELRRRFEAAGDIEFHSATLNWRGIWSGQSVKRLIAKGLLSKYDSHIISVQVMRGSLGCFKQFMYLSGFSRDWT

SEQ ID NO: 1485 - protein, 1070 aa, synthetic construct
  source 1..1070: note = Description of Artificial Sequence: Synthetic polypeptide
SSFGLIVTNLNSETVLWGCQPLGQFSLIGTNMQNTTPRIINTNSLTNQIPTVSSLGAQSEHSAQVNPNSGYQCTICESSFRSKSGLGVHMSRRHKDEFDQLRLRTDRKAQWSEEELSMMARKEIELAANGERYLNKKLAEVFTNRSVDAIKKCRQRERYKTKIEQLKGQAVPLPEALESETIQRRPSIRERDLLVTPPNTLGTTPTELSNSEILAVLQGYPPVVCNDQWRVEVLQSIVDGAQASGKEITLQRLSTYLMEVFPSQNDRPIQTRPPRRPRNRRQGRRQQYALTQRNWDKHKGRCIKAILDGTEGTATMPSQGIMGSYWRQVMTQTSPTYSGTNTTFRTEHPLEGVWSPITLGDLRVHRVSLTKSPGPDGITPRTVRSIPSGVMLRIMNLILWCGKLPVSIRQARTIFIPKVGNASRPQDFRPITVQSVMVRILNAILASRLTSSVDWDPRQRGFLPTDGCADNTTIVDLILRDHHKRCKSLYIATLDISKAFDSVSHAAVSATLTAYGAPKEFVDYVQNSYEVCGTTLNGDGWRSEEFIPARGVRQGDPLSPIIFNLIIDQLLRSYPNEIGATIGDHTTNAAAFADDIVLFAETRLGLQTMLDTTVDFLSSVGLTLNSDKCFTVGIKGQPKQKCTVVIPETFRIGSRSCPALKRTDEWKYLGITFTAQGRTRYSPADDLGPKLLRLTRSPLKPQQKLFALRTVLIPQLYHKLTLGSVMIGVLRKCDILVRSTVRKWLGLPLDVSTAFFHAPHTYGGLGIPSVRWVAPMLRMKRLSNIKWAHLAQSEAASSFLTDELNKARGRTLAGLNELTSRTEIETYWANRLYMSVDGRGLREAGLFRPQHGWVCQPTRLLTGQDYRNSIKLRINALPSRSRTTRGRNELERQCRAGCDAPETTNHILQNCYRTHGRRVARHNCVVNNLKRILEEKGHTVHVEPSLQLETSVSKPDLVCIRDNHACVIDAQIITDGLFLDDVHHRKVEKYKRPEVISALRREFGVSGNVEVLSATLNWRGIWSNQSVRRLIAKGLISSGDSNVISARVVTGGLYCFRQFMYLAGYTRDWT

SEQ ID NO: 1486 - protein, 1070 aa, synthetic construct
  source 1..1070: note = Description of Artificial Sequence: Synthetic polypeptide
SSFGLIVTNLNSETVLWGCQPLGQFSLIGTNMQNTTPRIINTNSLTNQIPTVSSLGAQSEHSAQVNPNSGYQCTICESSFRSKSGLGVHMSRRHKDEFDQLRLRTDRKAQWSEEELSMMARKEIELAANGERYLNKKLAEVFTNRSVDAIKKCRQRERYKTKIEQLKGQAVPLPEALESETIQRRPSIRERDLLVTPPNTLGTTPTELSNREILAVLQGYPPVVCNDQWRVEVLQSIVDGAQASGKEITLQRLSTYLMEVFPSQNDRPIQTRPPRRPRNRRQGRRQQYALTQRNWDKHKGRCIKAILDGTEGTATMPSQGIMGSYWRQVMTQTSPTYSGTNTTFRTEHPLEGVWSPITLGDLRVHRVSLTKSPGPDGITPRTVRSIPSGVMLRIMNLILWCGKLPVSIRQARTIFIPKVGNASRPQDFRPITVQSVMVRILNAILASRLTSSVDWDPRQRGFLPTDGCADNTTIVDLILRDHHKRCKSLYIATLDISKAFDSVSHAAVSATLTAYGAPKEFVDYVQNSYEVCGTTLNGDGWRSEEFIPARGVRQGDPLSPIIFNLIIDQLLRSYPNEIGATIGDHTTNAAAFADDIVLFAETRLGLQTMLDTTVDFLSSVGLTLNSDKCFTVGIKGQPKQKCTVVIPETFRIGSRSCPALKRTDEWKYLGITFTAQGRTRYSPADDLGPKLLRLTRSPLKPQQKLFALRTVLIPQLYHKLTLGSVMIGVLRKCDILVRSTVRKWLGLPLDVSTAFFHAPHIYGGLGIPSVRWVAPMLRMKRLSNIKWAHLAQSEAASSFLTDELNKARGRTLAGLNELTSRSEIETYWANRLYMSVDGRGLREAGLFRPQHGWVCQPTRLLTGQDYRNGIKLRINALPSRSRTTRGRNELERQCRAGCDAPETTNHILQNCYRTHGRRVARHNCVVNNLKRILEEKGHTVHVEPSLQLETSVSKPDLVCIRDNHACVIDAQIITDGLFLDDVHHRKVEKYKRPEVISALRREFGVSGNVEVLSATLNWRGIWSNQSVRRLIAKGLISSGDSNVISARVVTGGLYCFRQFMYLAGYTRDWT

SEQ ID NO: 1487 - protein, 1057 aa, synthetic construct
  source 1..1057: note = Description of Artificial Sequence: Synthetic polypeptide
FERQNFSDGLVPQRKFIHIGTTNRNNEPRSNLRNLMTTRPSVDIFPEDQYEPNAAATLSRVPCTVCGRSFNSKRGLGVHMRSRHPDELDEERRRVDIKARWSEEEKWMMARKEVELTANGHKHINKQLAVYFANRSVEAIKKLRQRGDYKEKIEQIRRQSALVPEVANLTIRRRPSRSEQNHQVTTSETTPITPFEQSNREILRTLRGYSPVECHSKWRAQELQTIIDRAELEGKETTLQCLSLYLLGIFPAQGVRHTLTRPPRRPRNRRESRRQQYAVVQRNWDKHKGRCIKSLLNGTDESVMPSQEVMVPYWREVMTQPSPSSCSREVIQMDHSLERVWSAITEHDLRASRISLSSSPGPDGITPKTAREVPSGIMLRIMNLILWCGNLPHSIRLARTVFIPKTVTAKRPQDFRPISVPSVLVRQLNAILATRLNSSINWDPRQRGFLPTDGCADNATIVDLVLRHSHKHFRSCYIANLDVSKAFDSLSHASIYDTLRAYGAPKGFVDYVQNTYEGGGTSLNGDGWSSEEFVPARGVKQGDPLSPILFNLVMDRLLRNLPSEIGARVGNAITNAAAFADDLVLFAETRMGLQVLLDRTLDFLSLVGLKLNADKCFTVGIKGQPKQKCTVLEAQSFYVGSREIPSLKRTDEWKYLGINFTATGRVRCNPAEDIGPKLQRLTKAPLKPQQRMFALRTVLIPQLYHKLALGSVAIGILRKTDKLIRYYVRRWLNLPLDIPIAFIHAPPKSGGLGIPSLRWVAPMLRLRRLSNIKWPHLTQNEVASSFLEAEKQRARDRLLAEQNELLSRPAIEKYWANKLYLSVDGSGLREAGHWGPQHGWVNQPTRLLTGKEYIDGIRLRINALPTKSRTTRGRHELERQCRAGCDAPETTNHIMQKCYRSHGRRIARHNCVVNRIKRGLEERGCVVIVEPSLQCESGLNKPDLVALRQNHIDVIDIQIVTDGHSMDDAHQRKINRYDRPDIRTELRRRFEAAGDIEFHSATLNWRGIWSGQSVKRLIAKGLLSKYDSHIISVQVMRGSLGCFKQFMYLSGFSRDWT

SEQ ID NO: 1488 - protein, 1063 aa, synthetic construct
  source 1..1063: note = Description of Artificial Sequence: Synthetic polypeptide
TCLAANLSGKNFSDGLVTQRKFTHIGTTNTNNEPRISLHNLMTTRPSVDIFPEDQYEPNAAATLSRVPCTVCGRSFNSKRGLGVHMRSRHPDELDEERRRVDIKARWSEEEKWMMARKEVELTANGHKHMNKQLAVYFANRSVEAIKKLRQRGDYKEKIEQIRGQSALVPEVANLTIRRRPSRSEQNHQVTTSETTPITPFEQSNREILRTLRGYSPVECHSKWRAQELQTIIDRAELEGKETTLQCLSLYLLGIFPAQGVRHTLTRPPRRPRNRRESRRQQYAVVQRNWDKHKGRCIKSLLNGTDESVMPSQEVMVPYWREVMTQPSPSSCSGEVIQMDHSLERVWSAITEHDLRASRISLSSSPGPDGITPKSAREVPSGIMLRIMNLILWCGNLPHSIRLARTVFIPKTVTAKRPQDFRPISVPSVLVRQLNAILATRLNSSINWDPRQRGFLPTDGCADNATIVDLVLRHSHKHFRSCYIANLDVSKAFDSLSHASIYDTLRAYGAPKGFVDYVQNTYEGGGTSLNGDGWSSEEFVPARGVKQGDPLSPILFNLVMDRLLRNLPSEIGAKVGNAITNAAAFADDLVLFAETRMGLQVLLDKTLDFLSLVGLKLNADKCFTVGIKGQPKQKCTVLEAQSFYVGSREIPSLKRTDEWKYLGINFTATGRVRCNPAEDIGPKLQRLTKAPLKPQQRMFALRTVLIPQLYHKLALGSVAIGVLRKTDKLIRYYVRRWLNLPLDVPIAFIHAPPKSGGLGIPSLRWVAPMLRLRRLSNIKWPHLTQNEVASSFLEAEKQRARDRLLAEQNELLSRPAIEKYWANKLYLSVDGSGLREAGHWGPQHGWVNQPTRLLTGKEYIDGIRLRINALPTKSRTTRGRHELERQCRAGCDAPETTNHIMQKCYRSHGRRVARHNCVVNRIKRGLEERGCVVIVEPSLQCESGLNKPDLVALRQDHIDVIDIQIVTDGHSMDDAHQRKINRYDRPDIRTELRRRFEAAGDIEFHSATLNWRGIWSGQSVKRLIAKGLLSKYDSHIISVQVMRGSLGCFKQFMYLSGFSRDWT

SEQ ID NO: 1489 - protein, 1057 aa, synthetic construct
  source 1..1057: note = Description of Artificial Sequence: Synthetic polypeptide
FERRIFPKGLVPLTKDNHIGTTNLQNEPRIFTNDLLTTRPSVDHVPEDQYEPNAAATLSRVPCTVCDRSFNSKRGLGVHMRSRHPDELDEERRRVDIKARWSEEEKWMMARKEVELMANGFKHINKQLAVYFANRSVEAIKKLRQRGDYKEKIEQIRGQSALAPEVANLTIRRRPSRSEQDHQVPTSEASPITPLEQSNREILRTLRGYSPVVCPSKWRAQELQTIIDRAEFEGKETTLQCLSLYLQGIFPVQGVRHTLTRPPRRPRNRRESRRQQYAVIQRNWDKHKGRCIKSLLNGTDESVMPSREFMEPYWREVMTQPSPSSCNGEVIRTDHSLETVWSAITEQDLRASRVSLSSSPGPDGVTPKTAREVPSGIMLRIMNLILWCGNLPHSIRLARTIFIPKTVTAKRPQDFRPISVPSVLVRQLNAILATRLTSSIDWDPRQRGFSPTDGCADNATIVDLVLRHSHKYFKSCYIANLDVSKAFDSLSHAAIYGTLRAYGAPKGFVDYVQKTYEGGGISLNGEGWCSEEFVPARGVKQGDPLSPILFNLVIDRLLRALPSEIGTKVGNAMINAAAFADDLVLFAETRMGLQTLLDKTVDFLSTVGLKLNADKCFTVGIKGQPKQKCTVLEAQSFCVGSREIPTLKRTDEWKYLGIHFTASGRVRCNPAEDIGPKLQRLSEAPLKPQQRLFALRTVLIPQLYHKLSLGSVTIGVLRKTDKLIRFYVRRWLNLPSDVPIAFVHAPPKCGGLGIPSLRWVAPMLRLRRLSNIKWPHLVQSEEASSFIEAEKQRARGRLIAEQNELLSRPAIEKYWANRLYLSVDGGGLREAGHYGPQHGWVSQPTRLLTGKEYLDGIRLRINALPTKSRTTRGRHELERQCRAGCDAPETTNHIMQKCYRSHGRRVARHNCVVNRIKRGLEERGCVVIAEPSLQCESGLNKPDLVVLRQNHIDVIDVQVVTDGHSMDEAHQRKINRYDRPDIRTELRRRFEAAGDIEFHSATLNWRGIWSGQSVKRLIAKGLLSKYDSHIISVQVMRGSLGCFRQFMYLSGFSRDWT

SEQ ID NO: 1490 - protein, 1309 aa, synthetic construct
  source 1..1309: note = Description of Artificial Sequence: Synthetic polypeptide
MEVPLTSSLGSGATQAPGTPELLGEHTVERPGLDQGHSYGLLMDDVELPVRLPFFGPLICPGCRTLLTSEETISSHHRRVHPDARTRWVCYGCDSPFMTYRAIKCHLPKCSGRKVVTGDHICNGCTKRFESQRGLSLHKRRAHPGLRNEEMLEPPVRAERRPNAHKSSIWSIDEIRILEQYEAAYVGDLHINMKIAAHLPFKTNKQVSNYRNDRRKKSRTATDASQQGLGPNDGNRGIVPSGQSSPLFLEGSDAEGDEDVFNVLVPPTLGGLEPAGQVHSLSEGETSPLVGEADPCFMGGTPSAGEASGSTLLGPDPTPADGYSLVRKDLQLSVQTSPLLAVGSVGTESVQFERGVLSCGTPPEFLHPEQFAHCANNDPVLNASEEQVHAPLGEEANDLPDNNHPSELGVDPEDPTCSPATEQVQPSSEEEADDPFAQFKAWRRRVASYALKIETGVLPAQVDDLLRRLRDGDTQSKVTCEEVEEVVLSLTRTILGGTAPKKRVEGRTKWTYKSRTNHEARKRIMYARCQDLYRRRPQRPVERAVGYQAEESLLDNQDERPSHGAFETFYTGLWGKSGQCNITMPPGVPRHTGHVLREVTPKDIYSRLRKLKKDYAPGPDGVTKLKVQSMGAYPSLLAKVYNLVMLTGYFSSCWKEHKTSLIPKDRGSPMDVSNWRPITIGSLLSRIYTGLIERRLRTVSDIHQRQVGFMPVNGCAANLFIFDECIRQAKKEGTIVGSLIDVAKAFDTVPHEAILRALSSQGVDEHTMAHIRDMYSGIRTRINGKGSDIPLVRGVKQGDPLSPMLFNMVMDPLIRDLQRKGFRIGGHEIGALAFADDIVLLADSIDGAQDHVDQVGRYMNKLGMTLNPRKSSSFLITAMRKTWICRDPGLSIGETKVPGARPSSALKYLGVNYTLSEGLESGALIDKLMQAVNRARGLALKPLQKVNLILERIIPKFLYGIILGGPSLTRLHAADKCVRMAVKEILHLHPSTTDHVLYARKKDGGMGIPRLAHLVRLASLRSGLALLASGDVAVQAAGMAGDLEGRCKKVANDLRLNWPVTLRDVVRASNKFKSQESKDWERLASQGHGVKDFRNDRLGNCWLYDPTVLSSSRYTDALRLRTNTFGVNVALRRADKDLEVNCRRCHGKPETLGHVLGECVAGKGMRIQRHDKMAAFVATKCEEKGYQTTREQLFSIEQGKLKPDLVVIDGERALIVDVTVRFESGNALSRGASEKIEKYQPLADYFVSQGAVREANVLPIVVGSRGAITQATLKSLATLGLDVERVGKYLAICAVASSVEIACMHLDYT

SEQ ID NO: 1491 - protein, 1198 aa, synthetic construct
  source 1..1198: note = Description of Artificial Sequence: Synthetic polypeptide
MMADYNNSVDHALEDNTRLIFARDAVLARVCGPFDNLECGLCGVLLTSLQGVREHCHRAHHNLDLTFQCTKCDKGFSSYRGICCHFSKCIGARISVSEGPLSCSECEREFDSKRALSTHERHMHPGIRNAKRLKDFNPRGGGGKTIHGNTKWTEEEVQLLVSLSKRFEGYKSINKEISLILTSKTCKQISDKRRYLNLHNGNGGLAAAEAVLEFCEDSHPEVTESDGAVLSEIMDEECHQSSVTMRSSIVHGDIGREVQGKELVRIPPDNSVMGNCVVLLRKLATDKRSDLDLSKDKELRIDIEKATKANRESADGRVIQSVAGNEIDPDTFQWKELLLGQVRGFPRVDENSELFDLDDKLTKELSSDSPVWNDNCELIVSDLCQVLCKKKYELGRQHHVRKGKRHRGIHHKREKFRECQKIFRKSPRKLAEYLYRDKDLSHISKDASTPQGIEQYYSQLWGEPELLESNTIEEKLPSSSLFDCLPPITPEEVEGRIHKIRPSSAPGLDGVRKIHLVGKGITLVLVKLYNLLFLTGGYPECWKRNRTVFIPKIGKDLSEVGGWRPLTIGSLLARMYSAFLERRIRRVTSLSLSQRGFTNIQGCHVNLTILKEGIRQAKVKNGGVIVSVDIEKAFDTIPHSVIFSRLASQGVPPLLRKIISNMYKDVYTVIEGQCIPIKRGVKQGDPLSPLLFNIAIDPVLRSLEEFQGGLPLGNSAIKILAFADDIILGASSAGQAQQMVDMLGIGLTSCGLGVSHRKCFGFQIVNKNKTWTIVDPMITLNGSSLPFSGPEDRLPYLGVDINPWDRKSRYDAGQRLISAAKRGSQLSLKPQQKINLITAFLLPKFLYILIEDPPSPAYLKSIDHDLRQIYKNILHLPNCVSTAFMYSPKRDGGLGLPRLSCLVPLAHLKAGIKLGSLQDSLVREITTSDRFVRTMGSVAHSLWASWSLTLQDIYKLKSALKRREAKAWESCVSQGQGAAQFRGDSIGNNWLHNPGTYRPGQYIEALKLRANLTGVRVNLKRSGYNVPITCRFCKDIPETQAHVLGLCPKTKGMRIQRHDSIVNRVRDKLKTKSPVALMHEQNFTVEEGQVFKPDIVTILGEVGYVIDVTVRYDDRDYIKDASVEKIRKYEALKGYLKDLYPQLNKVEVLPLVFGSRGAVPGSTVHNMGLLGFTKREMVHISRKVIADSLIISNFLEVY

SEQ ID NO: 1492 - protein, 1198 aa, synthetic construct
  source 1..1198: note = Description of Artificial Sequence: Synthetic polypeptide
MMADYNNSVDHALEDDTRFIFARDSVLARVCGHFDNLKCELCGVLLTSLQGVREHCHRSHHNLDLTFQCTKCDKGFSSYRGICCHFSKCRGARISVSEGPLSCSECERKFDSKRALSTHERHMHPGIRNAKRLKDFNPRGGGKTIHGNTKWTEEEVQLLVSLSKRFEGYKSINKEISLILTSKTCKQISDKRRYLNLHNGNGGLAAAEAVLVFCDDSHLEVTDSDGAVLSEIMDEEYYQSSLTMRSSIVHGDIGREVQGKDLVRIPPDNSVMGNCVVLLRKLATEKRSDLDLSKDKELRIDIEKATKANRESADGRVIQSVADNEIDPDTFQWKELLLGQVRGFPRVDENSELFDLDDKLTSELSSDSPVWNDNCELIVSDLCHVLCKNKYELGRQHHVRKGKRHRGIHHKREKFRECQKIFRKSPRKLAEYLYRDKDLSHISKDVSTPQGIEQYYSQLWGKPELLESNTTEEMLPSSSLFDCLPPITPEEVEGRIHKIRPSSAPGLDGVGKIHLVGKGITLVLAKLYNLLFLTGGYPECWKRNRTVFIPKIGKDLSEVGGWRPLTIGSLLARMYSAFLERRIRRVTSLSSSQRGFTNIQGCHVNLTILKEGIRQAKVKNGGVIVSVDIEKAFDTIPHSVIFSRLASQGVPPLLRKIISNMYKDVYTVIEGQCIPIKRGVKQGDPLFPLLFNIAIDPVLRSLEEFQGGLPLGNSAIKILAFDDDIILGASSAGQAQQMVDMLGIGLTSCGLGVSHRKCFGFQIVNKNKTWAIVDPMITLNGSSLPFSGPEDRLPYLGVDTNPWDRKSRYDAGQRLISAAKRGSQLSLKPQQKINLITTFLLPKFLYILIEDPPSPAYLKSIDHDLRQIYKNILHLPNCVSTAFMYSPKRDGGLGLPRLSCLVPLAHIKAGIKLGSLQDSLVREITTSDRFVRTMGSVSHSIGASWPLTLQDIYKLKSALKRREAKAWESCVSQGQGAAQFRGDSIGNNWLHNPGTFRPGQYIEALKLRANSTGVRVNLKRSGYNVPITCRFCKDIPETQAHVLGLCPKTKGMRILRHDSIVNRVRDKLKTKSPVALMHEQNFTVEEGQVFKPDIVTILGEVGYVIDVTVRYEDRDYIKDASVEKIRKYEALKGYLKDLYPQLNKVEVLPLVFGSRGAVPGSTVHNMGLLGFTKREMVHISRKVITDSLIIISNFLEVY

SEQ ID NO: 1493 - protein, 1009 aa, synthetic construct
  source 1..1009: note = Description of Artificial Sequence: Synthetic polypeptide
MSNYNETNTSGGDNPRMATQTTGSLSSGPINQHTCELCCRTFGTRAGLGQHVRKTHPIESNQSINVERKKRRWSPEEIRRMANMEAQATINNIKHLTQYLATYLPQRTLNAIKGRRRDAEYKELVTGIIANLRSNSSTQQTNQVCNESEMSQRSKILQSIRESVRDLRSRRNKYAKALQELGEAALCGKMLNEEQLIHCIKSMFNTAKCPKGPRFRKTATHSGTNKQQRQQRYARVQKLYKMNRKVAAKMVLEETDKIQIKLPDHDPMFKFWESEFKEGEGMPERMPKDLKESPDLKAIWDPVTEEEVRKAKVANNTAAGPDGIQPKSWNRISLKYKTLIYNLLLYYEKVPHKLKVSRTVFIPKKKDGSSDPGEFRPLTICSVVLRGFNKILVQRLVSLYKYDERQTAYLPIDGVGTNIHVLAAILNDSNTKLSELHVALLDITKAFNRLHHTSIIKSLVGKGFPYGFITFIRRMYTGLQTMMQFEGHCKMTQVNRGVYQGDPLSGPIFLLAIEKGLQALDKEVGYDIGDVRVNAGAYADDTDLVAGTRLGLQDNINRFSSTIKQVGLEVNPRKSMTLSLVPSGKEKKMKVETGKPFRANDVPLKELSINDFWRYLGISYTNEGPERLSLTIEQDLERLTKAPLKPQQRIHMLNAYVIPKYQDKLVLSKTTAKGLKRTDRQIRQYVRRWLKLPHDVPIAYLHAPVKSGGLNIPCLQYWIPLLRVNRVNKITESQRSVLAAVGKTALLTSTVYKCNQSLATLGGNPTMLAYRTYWEKELYAKVDGKDLQNARDDKASTRWNGMLHSDISGEDYLNYHKLRTNSVPTKVRTARGRPQKETSCRGGCKSTETLQHVVQQCHRTHGGRTLRHDRIVGLLQHELRRDYNVLAKQELKTGIGLRKPDLVLIKDDTAHIVDVQVARCSKLNESHVRKRSKYDKKEIEVEVKSRYRVSKVMYEACTISYKGIWDKQSVMSMRRLGVSEYCLFKIVTSTLRGTWLCWKRFNMITSVRS

SEQ ID NO: 1494 - protein, 1455 aa, synthetic construct
  source 1..1455: note = Description of Artificial Sequence: Synthetic polypeptide
  VARIANT 916: note = Any amino acid
  VARIANT 1141: note = Any amino acid
MAGHKITMSEGKLLEVAVRYGGVRNVSYECPVPDCTKTFSQANNLIRHLNNFGNTKHRAHNFTYFFTCEKCKIQIHSNTKHNISNHYKQCCATGGGPSCETGQYFCPACEQAGLGNLESALRHFQSSHPEFNLPPRSQFSKSHPNSYTLSLKPKDHLMKILYSGPLTPGQLVCPIKICLRSSAARLFHDVSKLRKHMLVDHNRTLVYETTCGKCLRPVDTSKNMRKTTSHFEKCSGESFISSPSPIPQKTYKLDLPSTSTPPPRKSPKLQPYKPIRTFKNPLTKSSQSKSDNPPKPTPFFSPRTLERSASWPALSEVVDPLPKLKEKHPSLPCALDKCPPSPRIKPSTLVPPCHTANNSPKPTSPESPSTLKPLPRPIRPSKPLEDWLTVRSVGPDREIVLNIGPRPRPGPAAGSRTTSPPSTAPAKRVAANPIAAPLSGEPGATLDCGQTGRKVQPPKKRPTESAGSLPPPAEPATDLLTGREGLARLVEEYHLSGDFGAFCRDLERWTALSSTNRRPKPRRGRYNRGAAARATRNRGRDDRQDPQDRDDQGGPGPVTCGRPQRYKRAAALRSAFGRDMKATVRRIIDGERGDARCEIDPKTIEGRFRDELSPPVREGPECSLPPWMAEAQAGEHAPSNDSQPGDAYDGPITALEVEMVLSTLNVGSAPGSDGLSYGFWRALDPKGLVLSELFEVCRIERRVPGPWKSSRVTLICKDAEGDLDDLGNWRPISICQTVYKIYAAVLARRLQSWALDGGVISRSQKGFMPFEGVYEHVFLLDSVVADARATRRSLAVCWLDLRNAFGSVDHTTIVEALSRFGAPAGLVEMISDIYTGGSCRIRTRAGFTPDIPVGRGVRQGCPLSGIIFNLVMEVLLRGVEANNACGYRLSCAGGASVRVLAYADDVALVGSSRAEXKIQLGVCERFAAWAGFSFNNKKCAAMVLKHQRGGRRLLDSAPLRLCGEEVAILGPDSFYKYLGAHTGYGRQTGGQLVDRVERQVVRLFTSFLTPTQKLSALKRIVLPAMSFHLRVRPCAEGHLRRLDNTVRRCVKTALRLPKGSCRAFFHTSPDAGGLGITSVVAECDILTVTQAFKMLSSPDHLVSLVAKGRLGMHAARMGRSETASACAMADYLSGDSVMGHXSWKTGYRMPADLWTATRAASRRLSLRFSPQPQGEFGLESGTFKIAPRERRSLTRRLHHRQNLWWRNQWAALPNQGKTVAAHSAYAASNNWVKGPSSLAPQALFFGLKARLNQMPTRSVKACYSRAPNYDKSCRRCGAEVETLPHVLNHCPKSMKSILERHDSVLAEVLAAIPRGTFASVDVDRTSREHFRRVGEALRPDIVARRHDGSVVVADVTCPFESCASALDTAAARKIEKYDQLCANLRQLYRKPVESHALVVGSLGSWGRTNNTALAALGIRGAVRSRLAKQLVNLSVEGSHNIWLRWSGGIPKDLVR

SEQ ID NO: 1495 - protein, 1196 aa, synthetic construct
  source 1..1196: note = Description of Artificial Sequence: Synthetic polypeptide
MLRRGRIFLPASTKAGKTRGRMKWSREVNLFIMRTYYYVTKLETDLTIYRKKLHEHFSLKYPNVIISQQRISDQKRAIERNKLLSQETLDRLKEEVRKQLEDEQTNNVENEKLNSETYSHEYTTLTPQTILTKKTQQHTNIISSTQTSHSSTQTESITLLLENEVDILNTNPTEGATQTQEVKDKFETNLTMYSGMDPKARPPLPKLKYSSKLNELIRLFNNDILVDYISPDTQLSDVHTLTYCTAVTISEQLKYKIIAIEGNARHKKNFKPPWQQRLEKDIAKLRADIGKLTQYINNNRSKKVVQSVEQIFKNTKIHTSHENGNKKSQEFLDTLKQKLALKAHRLKRYNNSQKRKNENTIFLTNEKLFYRNLIKPKTDRDNSNIDIPTAEQLEMYWARLWENSAKHNDKANWITEEKERWDTIEEMQFDDVTEEEITTITARLHNWKSPGIDKIHNFWFKKLICLHKTIAKNLTDIISGNQSIPEFIATGITYMIPKGDFSIEASQYRPITCLPTIYKILTTVITKKINSHIEHNNILAEEQKGCRRGHMGCKEQLIIDSTIMKHATTKNRNLHCTYIDYKKAFDSIPHSWLIQVLEIYKINPIIISFLRNIMTHWQTTLKLKNPPNFVTTRQIAIKKGIYQGDSLSPLWFCLALNPLSHQLHNDRAGYRIKQQDNTETIISHLIYMDDIKLYAKNDKEMKKLIDTTTIFSNDISMQFGLDKCKTVHIIKGKVQPGDYTIDDTNTITAMEPSDLYKYLGFQQLKGLDHITIKQSLTSEYKKRINAICKTKLSGKHLIKALNTYAIPILTYSFGIIKWSKTDIEQIERITRTTLTKHNNLHPKSAIERLTIKRQDGGRGMIDIWHLWRKQIHSLKTFFYIKSDLSEIHRAIAQNDNNYTPLNLKQKELIDNTENLRNRNPQKDMEENWKKKALHGRHPHDLSQSHIDSKASNMWLKTGSLFPETEGFLIAIQDQVINTKNYRKYIIKDPTIRDDKCRKCNTQPETIQHITGACSTLTQTDYTHRHNQLANIIHQQLALKHKLIQNTNTPYYNYKPQTVLENDSCKLYYDRAILTDRTIHYNRPDITLQDKNNKVTYIIDIAVPNTHNIQKTFTEKMTKYTELKEEIVRIWKQKKAYIVPIIISTTGVVPNHIHNSLKLLDLKDNIFISLQKAAILNTCRIVRKFMQLEENQTYYTQ

SEQ ID NO: 1496 - protein, 1209 aa, synthetic construct
  source 1..1209: note = Description of Artificial Sequence: Synthetic polypeptide
METRSMRKRTTRLPEEGAPTGAGPGTGDRASIQRLEDEMVQERSFSQRALPVPRTQNRNGSPINHQGNAASANVAVADRQQSLILAGGRRQRIMWTREMNHYVIRCYYVYTRMETDMPGRVKMLGMFNDRFPRFAHQLDLSKLYIRQRAIILPEELEFIKLEVRREFGEEEAGWRESSRISARLNTIDQNTSRASEDRDLDEPTAPGLSVDIQHQMATAVTQFHGTDPLSRHRLPKLHYSYRLKTAVSIINQDVLPQYLDSVGSIEDLQLIVYSAAVAVVRTLWLRTYPQGDSEGRPCSKAEKPAWMRRLENRINATRTKIGRMQEYQRGNSSMKVVRQIAEMVKPKELRDLTDANITEVLDIHLQRLSALAKRLRRYAECSKRKEQNRMFNINEREFYNWIRNDKPNFREGLPDIGDFTQFWANLCEKPVQHNSEGMRLAEDERFSDGIEDMPVLVVNAQDIREATQYTRNGAAPGPDFVYNFWYKKLITIHEQIAACFNTVLEDSRKLPKFITGGVTYFLPKDQNTKNPAKYRPLTCLSNLNKVLSSVITQKVKDHCDTNNVMTEEQTGRRKNTQGCKDQVIIDAVIVGQAAKKQRNLDMAYIDYKKAYDSVPHSYLLKVLQLYKVDGNVIKLMQHAMGMWSTSLHVTDGKVVLRSRSLNIRRGIFQGDTFSTLWFCLAMNPLSRTLNQQCNFGYLLKSEEISTRITHTFFMDDLKLFAETVQKMHHLLKNVQGFSNDIKMEFGIGKCRSIHLHRGQVLDADSFRANEQEEIRHMVQGETYKFLGFLQLRGIHYAVIKKELQDKFLHRVSCILKSFLSVGNKVKAINTFAVALLTYSFGVMKWSNTDLEALERTIRVVSTKHQMRHPKASVERVILPRKIGGVGIIDIQALCISQIHQLRSYFVESQNRHELYRTVYKADHGLSALHLAQQDYQLNCNIKTVDGKGATWKQKELHGTHTHQLNLEHIDKVSSSTWLVRCDLFCETEGFMVAIQDRVIATWNYRRCILREDVEDRCRKCNSGGESIEHVIAGCPVLAGSAYLDRHNDVAKIVHQQLALRHKLVERFLPCYRYLPDPVQENDCIKLYWDREIITDILIRANRPDILVYEKRKKRATIDIDIAVTLDHNVQTTFSTKVMKYHDLAEELKQTWYLEDIRIVPVIISATGIVPMALLRSLDELELQRELPRIQKAVILRTCSTLRRFLNPYN

SEQ ID NO: 1497 - protein, 1281 aa, synthetic construct
  source 1..1281: note = Description of Artificial Sequence: Synthetic polypeptide
MTCNNAVVFPPADGNPAGTADRNFAIRFPSSEPPGPSGIRPSEPLDGRTGIGDVEHAQAGNGGFLVDVLEYKEAHRYGSKCEFCYVQTKGTVCSKPRTDAWLKCEILFLLHHAYTANQNKSIELAESAFRRAGITRRSKATIAKRWSLIQRGKGTDYKEYWDEYFEKFRYECNPTPIVRRKRNRLAAGLQSPSSVPNGYEFERKRTCETPLDTKASSLPLICNLLTGIVGVENVEENMSVECTEPKELSGTANSSVPGLAEGVYERRHNNVNEPAAGCPQDVPVANNLIDSPTTNDRLEAEFKAQLDRAERSYMRRRLPRLKNLSPDERMWIGTTVERLRLETVSEPVCEQWRLANAGLYAAIRSIAVMRPLDAAREAHKTWLLNMKMTERKLRQQIGWVETTRRTKNEARTERQEIVYRKVAKLRRERFPEMDLDSVSVHLKRKLELLKGRIQVRTAERLRRDTREAAGPYGKTALRGQGFAPNVKDATQYWSGLAQPSGQKCSENSAILSDWKELVECNLSSLPDQMEPLVVQGISRASPWKSPGPDGIFNYYWRQDFIVDWLKQLMLDSLRTGHYPWKLSSGRTVLLYKDGDPTKAENYRPITCLNGCFKMINSVVSEVILKRVENTIALPIEQMALRRKVWACVESQIWDQIKQRKLSDRTQKCKVAWVDFSKAYDSLNHDAIKFVIGVLKLPTGINNYLLDSMQNWSTHLELKSSGKVVRGPSYPIKRGVLQGDSLSPTLFVVVTSIIVRHIKTIESSDIQMYMDDIKLYGKDQETLTRLIKELQTVSNKLGLCMNLKKCAILGDDLPEEINGIEHLKESYKYLGVPQREITQVRATMAALEKKILTEVDTSLGAAELSYRQRISRVNSKIAPLVRFVVQSMLVTPRDVLKVYNRLGGIDVEIRRRLVKYEIRYKKSNVARLYLDRKVGGIGFVNLCRIMVEAVAARAVYCRLAPSFNEFQDFLAEQNTSPITAAQTILDKCGINIELSTSTLGDVKKIVRNHYHELWLTAWKNTGLYKRWENDHVDIKRSSLWINRGNLSANNARIGIGIQDNSIFCRGFVGNKCDTKYCRLCGDGIESVSHIVTGCPTHRTNLYIERHDCVARNVYAYLAIRYGIPVPHYTQRVKTIEKNGDQSVELYWNYKFPCTRALEACRPDIVLIDKVSKRTHIIEVAVSWRGRLQEMVDRKVYKYTVNGEYEADGSSRGWNIVRELNDQYGFPVEVYTLVIGAGGEILPCTVKDVERLTGGAATDNLIERMERSAVLGSCRIIKRHLAL

SEQ ID NO: 1498 - protein, 1354 aa, synthetic construct
  source 1..1354: note = Description of Artificial Sequence: Synthetic polypeptide
  VARIANT 69: note = Any amino acid
  VARIANT 444: note = Any amino acid
  VARIANT 854: note = Any amino acid
  VARIANT 907: note = Any amino acid
MISCDLERETLTQMALFRARSDKTPTHAGIPAPDEVREGGCGQNRTNPAAPRGKAAAIQRQNGITIPIXACAQSGLVRTQRVQQWSAVEESALKDVVVRNTDDRGLINWAKGVLPEWQRLCQLNPTMYMARSSPSLSNKWASLRRTHVGPGCPSKEGSGPSQDLSDVKIQPARLAHDTVAELPQRTVPCGTDGHGVIDSDETETALAEVSRSSPFGEREPLDLGATERITRKRLRNAVRDVVPPRKRRVPSTPSRKEQDLVPEVDGPAPTDVLTHPPTESEPEPMLDPLSLVQLVRPQLGRAMGWAAEEMELGNVVMDVELKREFNREVRRVGRTPPDQMYKRGAGPPLPQKREPERVALLEQLIAARVERGINRGLDWFLELNVAVFAAARVLSRRERVETLADRLHINDSATLSEVSRRRAKAERKLRCAREQPWMSRRIRXLGVRVERLKQLADLVRQRIAGRGNRSSYEGPRRRFRLRPSLRSVTEAPVNPPLNGNEVYTFWHSLWAQSLRANTDDCQLREFKNQLSAARHTDLTSVGTSSLVQMFSAALRKMKKGKAPGPDGIRAAWWGVFRRIAPYVATWVVRVIRGAEPVANWICNGLTVLLPKSSDNADPSNYRPITCLNTCYKLFTAVIAQITASYVDVLGGLPRQQVALRKGVWGTSVSLMIDALTVADARRAKRPLGVCWFDFKKAFDSVPHNLIRWILRVIGLPPVILSVIVSVMDQWATRLKIGGKVMPKTIPVRTGVFQGDTLSPLLFCLSVWPISFALDQFPQYQFRCANHLQQGFSVGHVFYMDDLKCYCPDREVLTAVIQQVQKSASALGLTIHYKKSAWLDQDGGKSGKAVLGVPXLVGTYKYLGMHERFMIVSKDSLESVRGKFMGRLKTLWTSKLTFGQAMLGTKSXCMPVVRYVLQNLFLPKSEFNQTRLVLREWDRQIRDLLDECNIRQVFRSKTELYVSREEGGWGLPSMEDALEEEVVTKLAILVARQETEPLFRVCEALERKRCPTPLSLGLQILKDWGVGVELQGRTLLLNGNTVGPSQATRKLTGELVLRREAERLSRWRSKVKPGCGMTGGAWRDVPGIDVHLSNRWLVKGALSPTVVSNSLAIRANTVILRGSGGGYTKGTLLRCRGCGNTGETRRHIVSACSLGRQKGAASRRHDNVCRILVRAICHKLNIEPPNSANFPHVVVLEGSGAKMWIDFPFVVPHKIRHTRPDIVVLFEWNGVRRLSVIEVAVSDVANMQTQHIRKSHRYGTNSTEPFVAGVTPTYRNDCLAAQLRAKFKAQQVDVIPIIVGTTGETLDGEFGRIRKGLPMLTKLQMPRLWSEIQRAVILGSYRILVEHLALPKGGA

SEQ ID NO: 1499 - protein, 1284 aa, synthetic construct
  source 1..1284: note = Description of Artificial Sequence: Synthetic polypeptide
MKMSHNRDTPSNGVKGTSVRLGTSLVRSPVGEAGAVRERGTHPSESVSQDSDASVNATGEGSVREQAPLSPPGAEEATVPTQRRTRHKWSREDRVVLWECFVASKREGPGYLKRLKQLWDERGIPGNFPQASLSGQIRQICSKNLLSEEERLQIAARMEAQVASPSADEPARQVPTRPVTPPRSPPVEPARRPSIPSEETPDLGAVPSEIDSADPNRSPSRGPRHLPAHNMSQSESEDDVTDPDVSDQQRSDSLEPRDLLRNSSVESTPGHPNQELSDTLLSNYVPSEIDSDDPNQSPRRGPRHLPAHDMSLSDSMDEETEPDLSDQQRSDLLELRDLLRNSSVETTPKGHPSLRHLPEPKIRAAAFRVNSVIGKIHTNNITETNALIKAGADLAVRILEVQPRPQRTQRKKDPPWKHRLEKNIAEIRKHLSWISEWRRGNLHDEEKKTLLESRYRCLEVGLTNLEDTLKQRLSAKRSKVRRFEARVAGFHQNQLFNTNQKRLYQTLRGEETSSDSPNAEESIRFWSDIWSKEVRHNNTAEWLHDVKEKNVAADPDLTITSQQLKKQLSKTKNWKAPGPDMVQGYWIKTFTSLHSRIAAQLNHCLQRGTVPTWMTTGKTVLIQKDKAKGTEVSNYRPITCLPLMWKVLTGIIYERVYQHLDSKKLLPDEQKGCRRNTRGTKDHLLVDKLLTKDARSKKKNLSMAWVDYKKAFDMVPHSWILECLDIYGIAGNIRNLIATTMPNWKTQLTSANKHLGEVSIKRGIFQGDSLSPLLFVLTMIPLSETLNKAGQGYNYSRTMKLNHLLYMDDLKLYAKSKDQVEQLLNIVHQYSQDIKMQFGVSKCGVLNIERGEVTASEGITIEEGTIKDIEEAGYKYLGVMEYNTILHRTMKDSIRKEYLTRLRLILKSHLNGGNTIKAINTWAVPVVRYSAGIINWTKKDCTDMDIKTRKLMTIYRALHPRSCVDRLYINRREGGRGLISVEDCVEAEKRALSQHFRESDDPWARCLVEAKLLKETETADQFKERRRLDRTNKWKSMKMSGQYLEAVQDKIVPDSWNWLLRGELKRETEGTILAAQEQALRTRYIQNKIDKRNVPSTCRICRSSDETINHVISECGVLAQKEYKRRHDKVARHLHWTLLRIHNFPVSERWYEHEPAPVVENEAVQIYWDKRMETDRVLHANRPDIVVKDKQEKSAKLIDISIPFDSRIVDKEAEKKEKYRDLAIELQRLWQMKVDVVPVVIGALGAMSKNLKTALRELKCGHLHPGTLQKSALLGTAHIIRKVL

SEQ ID NO: 1500 - protein, 1261 aa, synthetic construct
  source 1..1261: note = Description of Artificial Sequence: Synthetic polypeptide
MVFNNCKPKHLCPAIRPTGQQETNGGSEGTAEPTAGPSRPAVSEDAAQPVPLFEEGEYIRAHRDKTCPYCEVLWIGARSSKARSDSWPLCQILYLMKRNDDLRGQRTRYPLLESSLRAAGIARTKFAIIKCIRNVLRDRYVPNGPYSEHWKIYRANSGEVPQGATITKGKRSARVAGLPSPSQSGHHTKRIQAGTGIETETTVTETNTTPEVSHEHRDPCGEPETSAANVDKVTELTEDGSETRGTANVANGGVSVSDPGRKRQSSSQNRGNIETTNPELVGMWEDMFGVQLDGAMRTTERPRLPKLKHLSEPERLWIRAKLEQAWLQCVSYDVEQQWLNANAVLYAAIRSVAASRPCKEAREAQKTWLDNKKKDEAKLRRLIGRISSVHSMPKGDRTPREKKLVKNITKLKNTHYPDMDWGGLLNHFKVKLSQLKEKISVRVAEHKRKVNRNAAGQYGKSVAGSAGLAPDVVSATAYWSGLAQPGPKKFKASSPIFQTWKDDVAKNLNTEPVLLYPIIKECIRKPSPWKAPGPDGIYNYYWQQEFVAQWIQTLVKRTLDIGRFPTALMCGRTVLLFKSGDKSMPQNYRPITCLNGCFKITNAVLTKVILQRVQDTCALPREQMALKPKVWSCMEAQLRDQALQSEIGDDCKTAWIDFSKAYDSLDHDALRFVIQTIALPAGMEEYLLKSLDSWRTQLVLSDAGKVVSGKPYPIKRGVLQGDSLSPALFVLTTSPIVAHLQRTCPTGRIQLYMDDIKLYGKTESDLCMLIKETQRVANKLGLNINLKKCALFGKSIKQSIAGFDPLGDRTYKYLGIPQRDVADIKQAYDELKAKTVQTIGETMACDYLTTRQVINRLNSKIPPVVRFVTQSALCSAPMTRGLYNKITELDNVSRAELRKVLIYKATNVSRFYLATKEGGFGYASLQQVFVEAVVSRAIYCLRAPSLCDIREFILSKFDPVKVARIALARSKIDMDIERMDMASATRTIRQHYQAKWKTLFQQSKLYQKWVQHKIDIPNSSRWLQRGEISPRNCRIAVAVQDNTLLCRGFVGSKDPNKQCRLCNAGIETASHIVTECSTHRVHMYIERHDSVARNIYAVLAKNCGFWIPHYSQKIPTVKITKSYELYWNYKFPCTQALEACRPDIVLIDRAKKRILVVEVAVSYVTRLEQMTQRKLYKYGVNGEYQADGETRGWNICRELVQKYNMRIDLCIVVIGACGEILPCMVKEIEKISKVSGRQLLERCQRSAVLGTVRTVRRHLAN

SEQ ID NO: 1501 - protein, 1360 aa, synthetic construct
  source 1..1360: note = Description of Artificial Sequence: Synthetic polypeptide
MRKSFLQHIPELSSHIAMSVPARNYPKMCSLAQGSSGTLSHNGKGVAMHRCPSDDCAGKDPPQRGSQKGNLRSVRWTPSEEKAVFEYWSRLEQHAMLNGSEARGTCAITRSQFLIHWDGERESRSLSDGVPEYPMRTERAYYERVRLLRQRGWQWDCANECLVIGQCAEPCRKPNVVAIKADKGMKRSLVKGKLLSLPHVMGEINQVSVQVEVPLPSVPASVPQVEGVESKGFTETEPSNKPSLEGNPAEEGLRKPERVNVPVHGIISDSERKDLKDRFWSAYKTAKRSVGFRPALKIEPNRVNRAQWEVLDSCVVEVLKKRETSNGYRGCVLRHLNVAVYAAGYVLAEGNKERRQVIRRQSAEWLLRQKSEINNIRRHIGWITDELTRRRTGKNPTSRQLSNFAWLQRRYQVLGKPVRETRDLEVQRERLVSRLRLAQDRINSSMDREERVRKRMLPLRRKLEEPLGDSKLDTKQARTFWASLIGERKEFGKIPELENWAEEVRSKVTDGQGFASDHVDQTVWKKILGKARPLKAPGPDGIPNLLWKRLPSANQALFKWLMGIKRKQLSVPSWLTKGRVVLLPKGGDPVDPANYRPIACLNTQYKLVTGMVTAWVSEHLTTYSILPIEQRAMVSGTWGCTHAMVIDRAITSYAEATGLPLYVGFVDFAKAFDSVSQPWIRYALKVAGVHKRIRCLIGILMKCWSVRYEVFKSGRVLRSAPLAVKNGVLQGDTLSPLLFCLSVAVVSSAVGSLFDFEVTIPGRGVMQQQNHLFYMDDFKGFAPSEASLTRMLVTLERTASALGLKINKRKCALVHPRERENEETGSDIPVLGLRDTYKYLGIEERFGIVFEDAWDRVRTKMFERMRTLLCTEHTFGELRAAFASTIAPVARYLFLNVIVGGPSWSETLTKAKDMDLRIRRLLWERRDNEPGWRFKHCSADRLYLRVQYGGLGFVSVEDTLSESIIYCWAYVQCRPELELARELFGTLNRSARSGIKQSIAKGARKVFRSYALLSKNSAQRVSDLDGDASPGFRVGEMIFMEPTRGARAIVKILRKENDSRRLAAWKGRPMGGRVVSLPELDQVHSYHWLIRARIGRRSFRDCIAAQEGQLKARELMCPHINAKAKWCRRCGDGRVETEQHILSGCAWSRTGTMLDRHNGVVRQVHTALCRKYGLPVSSHVVPLHAVIENEHAKILYDVALHTSPAGVLPREDGSTSYTGLRSTRPDMVIFDKKARTILIVEISVPWRENLVKQELIKWRKYAINSMIEPLELAEAEIPGPNLKHALGLAYGTSFPTVKVVPIVVGSCGEVLPNITKRLSELGIPKRGIPSLLESIQRAAIIGSGHVIRAHLSVPRSESET

SEQ ID NO: 1502 - protein, 1000 aa, synthetic construct
  source 1..1000: note = Description of Artificial Sequence: Synthetic polypeptide
MQKFSVPKDSSQIFLVDSILNKHICSTKNKVKDVIKRRSIIKTLICAAGLTLRKLVCGKLGNNKYNSKINQLWKKERKIINCIEDLKHLIETNKRRHNFGKRLRNAKVSPSEMLKDYYNKLRYIKNEITACLDEHKKAILRTKFKLTPSIKIISNIQNHNDEEAELPKEEEFVKYYKELFTNKDGDDKETPHLDNWLKKFSKTLIVDWTINDKEILEALKYCGNFKAPGSDMVMKVCYKWFKSAQNYLIRWIKSTWYGEYTINKKDTNAVTFMIWKRDGKPKNDVKSYRPISCLNCDFKLLNKLIANKIYESIEKILPINQMAVIKNKHGTCEALLLYKSLVQSMKFRRTKDVKEIWCSWIDFSKCYDSISHKCLKKMIQSIKAPPIIHKLILDGIDSWNISICNGKNISKTKIPVKSGILQGKVASSLYFVLLTGEISYALNKEEQVPIETITPSNTLKINHISFIDDYQLYATSQKKVEKLTIKLREIAEEMNLKLNPQKCGIYGTDDLGKRLMLKESSLNFPYTSEYKYLGLVENSLDLKDINIQLFKDKILSKYSTIFESRLTTHQKRKVFNSTISPCAAYYLGNLITNKCSIQELLNECKKFDQMVRNQLVNQNIKKLQVSNSRIYLPKEYNSLGLNEIEIEVAANIIRKACYIKKRETLRGVDKLYIAMSKNGHRNTLSDALYITKKYSNFQINWNIMGMVKDQNNILLDAKKIIENIKEKRRNLWLEHWKKGNMTYANEAIKKEFHLPDLNIDSKYLMLCYAGSEEQIIYNGHVSLVNQSSPSSRLCRKCNKLEETSYHVASVCEFHKKNLHLMRHNSAVYHIITELCRIMKVKCTLRYPEASGIIKSGNMKIAAGVKYTFGTAKIYHNKPDLVWYTPEVIYVIEVSISSLKNAKSQMKMKTARYAVNSTKKLENFAALNNLKKGENFVEILSHKANFKRVHFMPLVFCTFGEIPKETMKYLEKLNFSNEKIKTIASPIARYTGRTLKAHFTN

SEQ ID NO: 1503 - protein, 1292 aa, synthetic construct
  source 1..1292: note = Description of Artificial Sequence: Synthetic polypeptide
MISRSQADRPVEGQPVTAMSFHNLEPNNLYPENLRPTGSQDANRGVADIAEEVTGPSGLVTNEEAARAPPLFVEGEYKRAHCGGGKCHYCRVLWIGARSSKARTDSWNLCEILFLINKCMELGNVRRIYSPLESSLKEAGINRTRHAIVKCRLAVMRDRFVDNAPYSEHWRLYNACAENRAVVVPMDSATTVKKRTARQAGLESPSQIGVAGKRVHEAETGTDRINAVIETNTTPLEDIDLSPETPEGLAELPSTVEIMELTEDGSRSRGTANDADGGVSISDPLRNRPSSSQESRNVPEQVDPDGELVWESLYGAQLRGAMRTTDRPRLPKLTKFSAAEQLWIKSKVEKARLECVSYGIEQQWLRASAVLYATIKTVAACRPYNKAREAHKVWLENKRAEEKRVRRIIGRIETVRTMPKGKRTDKQIRLARKINRLKRVSFPEMDWHGFLNHFKAKLDLLKKLISVRVAEHERKISRKIAGTYGKSVSGQSGFTPDVVAATTFWSGLAQPGPKKFKKNSLIFQTWKDSVVENMNTEPVLLHPLIIECMNKPSPFKATGPDGIFNSYWRQGFIANWVKSLIQRTIQTGEFPASLMCGRTVLLYKNGDTAKPENYRPITCLNGCFKMTNAVITKVIVQRVQDTCALPGEQMALKPKVWACMEAQLRDQALQSEIGNDCKTAWIDFSKAYDSLDHDAIRFVIETLALPDGMEKYLLKSLESWKTKLVLSNRGKVATGRPYKIKRGVLQGDSLSPALFVIATSPIVSHLKRVCPSGRIQLYMDDIKLYGKSETELRMLIKEVQKVANKLGLQMNLKKCSTYGAGLTESIAGFDPLGDRAYKYLGVPQRSVADTNLAFGELEGKVIRSIEETMACEYLTMRQVVTRLNSVIGPLVRFVAQSVLTSQAKVSWIYNKISDLDSKIRAKLAQTGLRYKKSNVARLYLSKSKNGIGLVNVQQVLVEALVSRAIYCLRAPSLVEIREHILTAEFDPVGAARTVLRRSRIQLEIERVEMASAISAIKTNYQARWMTKFTQSKLYQKWVHHDIDLANSNLWLERGEISPQNARIAVAAQDNTLLCRGFVGNRESEKQCRMCNMGIETCSHILTECSYHRAHMYIERHDSVARNIYAVLAKDHGLWIPHYSQPVSSVTKTPTCELYWNYKFPCTRALEACRPDIVLIDRAKRTILIVEVAVSYVTRLKQMVSRKVYKYGVNGEKGADGESRGWNMIRELSEVYNMKVNLCAVVIGASGEVLPCTVKAIQSISSKTSSRQLLERCQRSAVLGSTRVVKRHLAEFH

SEQ ID NO: 1504 - protein, 1177 aa, synthetic construct
  source 1..1177: note = Description of Artificial Sequence: Synthetic polypeptide
MEILWEDLRLKIEDRYGVTLPQRSASSLKNQYPKVILRGLPDSGLPWAGVQVNDTGQVVVVDHAEAATLRGSSPAAVDGEAEEPVVPPLPAAEVVESAADAAVPDPQSEIVADQGVETRPVENPPANSRETETEPVEVEPYLEGQYKFFVSKILGKSMWRKPIKYPRRVPETLWRQANELIERSIRQGEVSIQSLNCMVYAAGCAVKSSLDKKDQEAKRRESEWYACRKAEIKALERYLNFIDLELKRRSASRPLTSRQRQNLGVLITKYGRARVRSGVRLSELQAMLRDALVGIRKCMAKRSADKKRKQGKFVPIQRYLEPSSAEPRLSPDTVRAYWNDIVGSSQQSTSDSTIQDWSSNLSVPSQELNASKIMGWWRAAVSKSKPNKAAGPDGIPGVLWKRFRSASEWVCTWLYRLLQKRRIITPRWLSVGRVVLLPKKGPLEDPANYRPIACLNTVYKLITSVVEMAVREQIQACPGLVPYEQIANRKGVWGCTHASIVDRMITGASREGKGGGFPDLRVLFYDCKKAFDSVNRDHMFAVLRVANVNVKVVHLLHTLSQQWCVRYELRRNNRVERSSPLRVKRGLLQGDTLSPTWFCLCMAPISASIKTLNPGPTLRPNMGNGRNRGQVAIQVSHVFYMDDLKVYCPRVADQRRMEQNIPQLFGEIGLSINASKSAAAAAVGRYVESELPVLGTKDEYKYLGIESGFVVNEVAALDRMQAVLLNRVEAILSVKEHTVGQRRDAIRAKAIPGGAYILGHIILSDLDPRGAAERMRRLDIEIRRLVKSAGILHDKCSTARIHLSCEQGGLAWPSMERAYYVAVAYSASYLLTSQDETISRARDYFVSGRLSNKFTVYKHLTSIVDSLGLSVELPDPNGLPTGQPSVLARTIARAIDAKLEAQWKETLLTYQRAGRVERADPTVVDHANSYHWLRKAWINEKAYQHAVSVMEGTLLEGVNPHGVLTMCRACKAPSASIAHIITGCAELRKSHMKVRHDGVTRWLYNALTEVDGSLPKFHYTQQIPAEMRGERLTVRYDSDIVTPNKPRHNRPDLVVFDSTRKVIYIVEVSVTWLSVLQKQYDNKLNRYAVNSNHEFSESIPYPPGVNLANEIRVLYPQFTGGVKVFPMIISPTGEVHMQFVPHLAELLENPNIPRILEKIQRSVVLGTDYIIRSYFAM

SEQ ID NO: 1505 - protein, 1353 aa, synthetic construct
  source 1..1353: note = Description of Artificial Sequence: Synthetic polypeptide
MPCSTNSFFERGTPEPHREPISGTDSSESLGMGTHRSPRLNDDEVINGPKGHESDPVHVVRAPRTLHPRRLELPIGVNNLGEASQLRQDSAIAEEAQLESTENHDGRRPPLRGGRKLWSEKEIATLRRLCEAYGNRQVCWKEVQRKFADFHEERTVAALATKWGALKRPRAPMVGAPPTPDHDPERGPAGEGDGGTTSQENVPTDDPIPANGPTEGKESDVRPAVACRCTEPEEQLMESDVRPPAVVRLADPEQHTMKSGVKPVALDGSADLEERPKEKDIEQMGVDFEGEPRFRAFRKAFYGYFRWAVNSFDREPVKRVRRDCPKVFYAYADYLIATGSSKALGPNQSRIGRLNGLVYAAARTIHQFWREEVGHRQQGEKGWYTKTKATREDLQMLISMMESELARRKEKRKPGAKELENIHKLVARLGTRSTSGIVRRLEMTRQRLKLLEDRISLHEQEKRRKRLRKQFAETPSLKLLTKGAKDRGDTMVTMKSVMDFWRPIIGRRVTSNPDQLQVLRDWRDEQKKAYPADLDLEKADLEEKYEGAIRRIQPWKAPGPDGLHAHWWKALPSAKRLLGELVVDWLTTGKVTTGWMCRGRTILIPKKGDRGDPSNYRPITCLNTCYKVLTSVMNSVILSHLSRGEALPMNQRAMRKREWGCTHAMVLDRAMVMDAMAQKKHSLSVAWLDYRKAYDSVSHEYIRWAINSVNIPRSVQLTLKRLMSDWETRFESTQCRPKLRSDKMKVLNGIFQGDSLSPTLFVLCIAPISYALNKGVGQCQSSSGWSAGYGFEIGHQFYMDDLKLYARTPAMLDSQIQVVSEVSEAMGLHLNLSKCAKAHYAPHGAGGAQEAVEGAEGSRKGEIPILGLRSTYKYLGVEQRLLPMEVALKEFEDKFMDRAETIFASELTWGQMATAYNTIAIAGLRYVYSNTNGASPKLLEALKRAATLDTRIRDLLRRHKCRFRNSFVERLYIPRECGGYGLKSVEDTLRESILATWSYIATNPHLAGQQYFFERLAARGKRTPMADGVKILLDLGVEPQVDLKRRTVTVDGIVFEDPTKLHRYLVGKLLKARTEARIRRWKEASLAGRLVNDTSIDMRLSCLWMKKGFVSARNLRDALAVQEGSLLTRACPALKGKGGQEVCRCCHAAPETAEHITSACRYWLPSLYVERHDSVARNLYYVICCRYGITPVHYSNRVSPLSENSQCRVLWNMDMQTRTPMKHRKPDIVVFDLKREKILMFEVSIAHASGLLKQREIKINRYTVNSEELPDETITPYPPGPNLAADLAATYGWQVEFAPVVVGTCGEHVPAVKEDLQRTLDLKPHQVEALLERISRSAVIGTARVVRAHLACS

SEQ ID NO: 1506 - protein, 1368 aa, synthetic construct
  source 1..1368: note = Description of Artificial Sequence: Synthetic polypeptide
  VARIANT 435: note = Any amino acid
  VARIANT 572: note = Any amino acid
  VARIANT 607: note = Any amino acid
  VARIANT 611: note = Any amino acid
  VARIANT 757: note = Any amino acid
  VARIANT 1272: note = Any amino acid
ITYTANMALVTLFMENMENKRYNLRPLPGGRRGASGANAGCHSMRTVGDGGLSRRVPLEKNVTAEQSSSPLTSSSSHSPVSSIPSPSSTRTLLNSPNSSPTSSHSSLVIRSADVVQEALANYPAPTAGSIRARKKWTDIMNRYIWRTYLIITKCETTLLNNYLEPLHQEFSSKFPEMQVTRQRIGDQRRAIIRNKLLSDDTLAQILIEVKELLQIGDQPLTQNNIHSTQLSHSNTRIKWSNELNEEIVKCYFEVTLLEVNKTSYRKNLYSLFISRNPHLSHLTEQRIADQRRLIFMNKSVHNDRIIELKREVEIKLANSNSLTKNITESNSPSSQTNEINDSAYVQSNLQPVEPLDQHCINRHNLIEKHYVEQEFNNALIQFNNTNPETRPYIPRQKSSRKFSQIVSFLNSEVLPKHLNNELDFNALHNIIYTAXYTASLCNGTKFSFIDNYRPRNSKPSWQRRLESRIDKYRLQIGRLTQYISGNRNRKILKTVEEIKTQYKIHSHHEEPNTELPHFLDTLKQKLNATSNRLRRYLTCTKRKQQNNTFVNNEKHFYRTLSSTNQNTTTQLXEHPTENNLQQYWANIWETSIEHNADAEWLNKIPDXEINXMKFKDISIETFNQIIQRTHNWKAPGTDNIHNYWYKKLTCTHSLLLKHINQFIQSPCTLPLFITNGITYMLPKGLDPTNPANYRPITCLQTIYKIITACITDIIYKHIDQNNILAEQQKGCRKNSQGCKEQLTIDAIVMKQAHNKNXNTMYIDYRKAFDSVPHSWLLYILKKYKIHPILITFLSSVMLSWKTRLKLINNNETLITDWIKIQRGIFQGDALSPLWFCLALNPLSELLNNTNTGFKLKHNNTYHIISHLMYMDDIKLYASNNKELKILADLTQSFSTDIRMEFGIEKCKVHSIKRGKSQQNTYILNTGEQIESMDENSTYKYLGFQQAKQIQQKQTKIELTNKFKFRLNQILRSQLNSRNIIKAINTYAIPILTYSFAIINWSQTDLSNLQRIINTHMTTHRKHHPKSCIQRLTISRLDGGRGLIDIRNLHNNLVTKFRNYFYAKAEISELHKFIVNIDNKYTPLNLNDRNIQLNQTLITKQQKIEAWSLKSLHGRHLADLSQTHVDKVASNEWLRRGDLFPETEAFMMAIQDQVIDTRNYQKHIIKRPNMVNDLCRRCYSSPETIQHITGACKTIVQTDYKHRHDQVAAIIHQHLAFKHSLITQAQKTPYYKYSPQAILESTNFKLYWDRTIITDKTVHYNRPDILLHDKVKXSVYLIDIAIPNTHNLASTFSNKIDKYTDLTIELKSQWKVQSVTTVPIVLSTTGVVPHTLHTSLETLGIHRLSYILLQKAAILNTCRIVRKFLSSNN

SEQ ID NO: 1507 - protein, 1136 aa, synthetic construct
  source 1..1136: note = Description of Artificial Sequence: Synthetic polypeptide
  VARIANT 5: note = Any amino acid
  VARIANT 131: note = Any amino acid
  VARIANT 269: note = Any amino acid
  VARIANT 354: note = Any amino acid
MSGTXTDRVIPARTSPGSTRSASGVGEPGPPDVKLATGTRHSWSRAENVVLMECYYGSNPSERGYMQRMWEKWVLRNPTSSLTKKQLLAQCSNIRNKKLLSQLEIDEARRCASPTVQICYGKGEPGRQVSXGVISSSPPNIEIGYKAPMTDGLGTRAADLRERIMKSWGNSTTSLPRLTHKVPDQSLLEDMNTALSTIPTTTITETNQLMYAAATVILQMLGYKMKSMNSQKEQMAPWRRRLEAKIMATRREVSLLTELSRGVNLRTEXPKKYNKLSTTEALETAKQRLTALATRLKRYTREVEARRINKVFSTNPAKVYSQWQGNKMTTDPPRAETEQYWKSIWEKEATHNTXAQWLQDLQTEHSQLPEQDPVVITLADIQTRVSKMKSWTAPGPDKIHAYWLKKLTALHERLAAQMNQLLTSGNHPEWLTQGRTVLIMKDPQKGTIPSNYRPITCLSTTWKLLSGIIAAKISRHMDQYMSRAQKGIGNNTRGAKHQLLVDRAIAQDCRTRHTNLCTAWIDYKKAYDSMPHTWILECLKLYNINRTLREFIQNSMKLWNTTLEANSKPIARVSIRCGIYQGDALSPLLFCIGLNPLSQIITKSGYGYQFRSGTTVSHLLYMDDIKLYAKNERDIDSLIHLTRIYSKDIGMSFGLDKCGRMISRRGKVIATDGVELPEGNITDVQDSYKYLGIPQANGNHEEAARRSATAKYLQRLRQVLKSQLNGKNKIQAINTYALPVIRYPAGIIPWPLEEIQATDIKTRKLNGKHKIQAINTYALPVIRYPAGIIPWPLEEIQATDIKTRKLLTMHGGFHPKSSVLRLYTKRKEGGRGLVSVRTTVQEETTSLREYIKKMAPTDRLLSECLRQQKPTKEEEPEGLSWKDKPLHGMYHRQIEEVADIEKTYQWLEKAGLKDSTEALLMAAQEQALSTRAIEARVYHTRQDPRCRLCGDAPETVQHITAGCKMLAGKAYMERHNQVAGIVYRNICTEYGLEVPGSRWETPPKVLENKQAKILWDFQIQTDKMVVANQPDIVVVDKHQKTVVVIDVAIPSDSNIRKKEHEKLEKYQGLKEEMERMWGMKATVVPVVIGTLGAVTPKLSRWLQQIPGTTSEISVQKSAVLGTAKILRRTLRLPGLW

SEQ ID NO: 1508 - DNA, 250 bp, Homo sapiens
  source 1..250: mol_type = unassigned DNA
ccggtcccccccgccgggtccgcccccggggccgcggttccgcgcggcgcctcgcctcggccggcgcctagcagccgacttagaactggtgcggaccaggggaatccgactgtttaattaaaacaaagcatcgcgaaggcccgcggcgggtgttgacgcgatgtgatttctgcccagtgctctgaatgtcaaagtgaagaaattcaatgaagcgcgggtaaacggcgggagtaactatgactctcttaag

SEQ ID NO: 1509 - DNA, 250 bp, Homo sapiens
  source 1..250: mol_type = unassigned DNA
gcggttccgcgcggcgcctcgcctcggccggcgcctagcagccgacttagaactggtgcggaccaggggaatccgactgtttaattaaaacaaagcatcgcgaaggcccgcggcgggtgttgacgcgatgtgatttctgcccagtgctctgaatgtcaaagtgaagaaattcaatgaagcgcgggtaaacggcgggagtaactatgactctcttaaggtagccaaatgcctcgtcatctaattagtgacg

SEQ ID NO: 1510 - DNA, 250 bp, Homo sapiens
  source 1..250: mol_type = unassigned DNA
tcccccccgccgggtccgcccccggggccgcggttccgcgcggcgcctcgcctcggccggcgcctagcagccgacttagaactggtgcggaccaggggaatccgactgtttaattaaaacaaagcatcgcgaaggcccgcggcgggtgttgacgcgatgtgatttctgcccagtgctctgaatgtcaaagtgaagaaattcaatgaagcgcgggtaaacggcgggagtaactatgactctcttaaggtag

SEQ ID NO: 1511 - DNA, 250 bp, Homo sapiens
  source 1..250: mol_type = unassigned DNA
cggcgcgctcgccggccgaggtgggatcccgaggcctctccagtccgccgagggcgcaccaccggcccgtctcgcccgccgcgccggggaggtggagcacgagcgcacgtgttaggacccgaaagatggtgaactatgcctgggcagggcgaagccagaggaaactctggtggaggtccgtagcggtcctgacgtgcaaatcggtcgtccgacctgggtataggggcgaaagactaatcgaaccatctag

SEQ ID NO: 1512 - DNA, 250 bp, Homo sapiens
  source 1..250: mol_type = unassigned DNA
gcattcgtattgcgccgctagaggtgaaattcttggaccggcgcaagacggaccagagcgaaagcatttgccaagaatgttttcattaatcaagaacgaaagtcggaggttcgaagacgatcagataccgtcgtagttccgaccataaacgatgccgaccggcgatgcggcggcgttattcccatgacccgccgggcagcttccgggaaaccaaagtctttgggttccggggggagtatggttgcaaagc

SEQ ID NO: 1513 - DNA, 250 bp, Homo sapiens
  source 1..250: mol_type = unassigned DNA
gtagccaaatgcctcgtcatctaattagtgacgcgcatgaatggatgaacgagattcccactgtccctacctactatccagcgaaaccacagccaagggaacgggcttggcggaatcagcggggaaagaagaccctgttgagcttgactctagtctggcacggtgaagagacatgagaggtgtagaataagtgggaggcccccggcgcccccccggtgtccccgcgaggggcccggggcggggtccgccg

SEQ ID NO: 1514 - DNA, 250 bp, Homo sapiens
  source 1..250: mol_type = unassigned DNA
cgcatgaatggatgaacgagattcccactgtccctacctactatccagcgaaaccacagccaagggaacgggcttggcggaatcagcggggaaagaagaccctgttgagcttgactctagtctggcacggtgaagagacatgagaggtgtagaataagtgggaggcccccggcgcccccccggtgtccccgcgaggggcccggggcggggtccgccggccctgcgggccgccggtgaaataccactactc

SEQ ID NO: 1515 - DNA, 250 bp, Homo sapiens
  source 1..250: mol_type = unassigned DNA
ccaaatgcctcgtcatctaattagtgacgcgcatgaatggatgaacgagattcccactgtccctacctactatccagcgaaaccacagccaagggaacgggcttggcggaatcagcggggaaagaagaccctgttgagcttgactctagtctggcacggtgaagagacatgagaggtgtagaataagtgggaggcccccggcgcccccccggtgtccccgcgaggggcccggggcggggtccgccggccc

SEQ ID NO: 1516 - DNA, 250 bp, Homo sapiens
  source 1..250: mol_type = unassigned DNA
tagctggttccctccgaagtttccctcaggatagctggcgctctcgcagacccgacgcacccccgccacgcagttttatccggtaaagcgaatgattagaggtcttggggccgaaacgatctcaacctattctcaaactttaaatgggtaagaagcccggctcgctggcgtggagccgggcgtggaatgcgagtgcctagtgggccacttttggtaagcagaactggcgctgcgggatgaaccgaacgcc

SEQ ID NO: 1517 - DNA, 250 bp, Homo sapiens
  source 1..250: mol_type = unassigned DNA
tgaaacttaaaggaattgacggaagggcaccaccaggagtggagcctgcggcttaatttgactcaacacgggaaacctcacccggcccggacacggacaggattgacagattgatagctctttctcgattccgtgggtggtggtgcatggccgttcttagttggtggagcgatttgtctggttaattccgataacgaacgagactctggcatgctaactagttacgcgacccccgagcggtcggcgtccc

SEQ ID NO: 1518 - DNA, 250 bp, Homo sapiens
  source 1..250: mol_type = unassigned DNA
tagcagccgacttagaactggtgcggaccaggggaatccgactgtttaattaaaacaaagcatcgcgaaggcccgcggcgggtgttgacgcgatgtgatttctgcccagtgctctgaatgtcaaagtgaagaaattcaatgaagcgcgggtaaacggcgggagtaactatgactctcttaaggtagccaaatgcctcgtcatctaattagtgacgcgcatgaatggatgaacgagattcccactgtccct

SEQ ID NO: 1519 - DNA, 250 bp, Homo sapiens
  source 1..250: mol_type = unassigned DNA
ccccccgccgggtccgcccccggggccgcggttccgcgcggcgcctcgcctcggccggcgcctagcagccgacttagaactggtgcggaccaggggaatccgactgtttaattaaaacaaagcatcgcgaaggcccgcggcgggtgttgacgcgatgtgatttctgcccagtgctctgaatgtcaaagtgaagaaattcaatgaagcgcgggtaaacggcgggagtaactatgactctcttaaggtagcc

SEQ ID NO: 1520 - DNA, 250 bp, Homo sapiens
  source 1..250: mol_type = unassigned DNA
gcgcaagacggaccagagcgaaagcatttgccaagaatgttttcattaatcaagaacgaaagtcggaggttcgaagacgatcagataccgtcgtagttccgaccataaacgatgccgaccggcgatgcggcggcgttattcccatgacccgccgggcagcttccgggaaaccaaagtctttgggttccggggggagtatggttgcaaagctgaaacttaaaggaattgacggaagggcaccaccaggagt

SEQ ID NO: 1521 - DNA, 250 bp, Homo sapiens
  source 1..250: mol_type = unassigned DNA
ggccgggcgcgacccgctccggggacagtgccaggtggggagtttgactggggcggtacacctgtcaaacggtaacgcaggtgtcctaaggcgagctcagggaggacagaaacctcccgtggagcagaagggcaaaagctcgcttgatcttgattttcagtacgaatacagaccgtgaaagcggggcctcacgatccttctgaccttttgggttttaagcaggaggtgtcagaaaagttaccacagggat

SEQ ID NO: 1522 - DNA, 19 bp, Homo sapiens
  source 1..19: mol_type = unassigned DNA
gtctacggccataccaccc

SEQ ID NO: 1523 - DNA, 38 bp, Homo sapiens
  source 1..38: mol_type = unassigned DNA
atcgcttctcggccttttggctaagatcaagtgtagta

SEQ ID NO: 1524 - DNA, 250 bp, Homo sapiens
  source 1..250: mol_type = unassigned DNA
acctactatccagcgaaaccacagccaagggaacgggcttggcggaatcagcggggaaagaagaccctgttgagcttgactctagtctggcacggtgaagagacatgagaggtgtagaataagtgggaggcccccggcgcccccccggtgtccccgcgaggggcccggggcggggtccgccggccctgcgggccgccggtgaaataccactactctgatcgttttttcactgacccggtgaggcgggggg

SEQ ID NO: 1525 - DNA, 250 bp, Homo sapiens
  source 1..250: mol_type = unassigned DNA
aaatgcctcgtcatctaattagtgacgcgcatgaatggatgaacgagattcccactgtccctacctactatccagcgaaaccacagccaagggaacgggcttggcggaatcagcggggaaagaagaccctgttgagcttgactctagtctggcacggtgaagagacatgagaggtgtagaataagtgggaggcccccggcgcccccccggtgtccccgcgaggggcccggggcggggtccgccggccctg

SEQ ID NO: 1526 - DNA, 250 bp, Homo sapiens
  source 1..250: mol_type = unassigned DNA
ggagcctgcggcttaatttgactcaacacgggaaacctcacccggcccggacacggacaggattgacagattgatagctctttctcgattccgtgggtggtggtgcatggccgttcttagttggtggagcgatttgtctggttaattccgataacgaacgagactctggcatgctaactagttacgcgacccccgagcggtcggcgtcccccaacttcttagagggacaagtggcgttcagccacccgag

SEQ ID NO: 1527 - DNA, 250 bp, Homo sapiens
  source 1..250: mol_type = unassigned DNA
aactggcttgtggcggccaagcgttcatagcgacgtcgctttttgatccttcgatgtcggctcttcctatcattgtgaagcagaattcaccaagcgttggattgttcacccactaatagggaacgtgagctgggtttagaccgtcgtgagacaggttagttttaccctactgatgatgtgttgttgccatggtaatcctgctcagtacgagaggaaccgcaggttcagacatttggtgtatgtgcttggc

SEQ ID NO: 1528 - DNA, 102 bp, Homo sapiens
  source 1..102: mol_type = unassigned DNA
tgaacgcgcccgatctcgtctgatctcggaagctaagcagggtcgggcctggttagtacttggatgggagaccgcctgggaataccgggtgctgtaggcttt

SEQ ID NO: 1529 - DNA, 150 bp, Homo sapiens
  source 1..150: mol_type = unassigned DNA
tctgttcttatcagtttaatatctgatacgtcctctatccgaggacaatatattaaatggatttttggagcagggagatggaataggagcttgctccgtccactccacgcatcgacctggtattgcagtacctccaggaacggtgcaccc

SEQ ID NO: 1530 - protein, 25 aa, synthetic construct
  source 1..25: note = Description of Artificial Sequence: Synthetic peptide
KRASSQALGTIPKRRSSSRFIKRKK

SEQ ID NO: 1531 - protein, 7 aa, synthetic construct
  source 1..7: note = Description of Artificial Sequence: Synthetic peptide
RKKRKKK

SEQ ID NO: 1532-1533 - skipped (2 entries)

SEQ ID NO: 1534 - protein, 5 aa, synthetic construct
  source 1..5: note = Description of Artificial Sequence: Synthetic peptide
EAAAK

SEQ ID NO: 1535 - protein, 5 aa, synthetic construct
  source 1..5: note = Description of Artificial Sequence: Synthetic peptide
GGGGS

SEQ ID NO: 1536 - protein, 4 aa, synthetic construct
  source 1..4: note = Description of Artificial Sequence: Synthetic peptide
  REGION 1..4: note = See specification as filed for detailed description of substitutions and preferred embodiments
GGGS

SEQ ID NO: 1537 - protein, 5 aa, unidentified
  source 1..5: note = Description of Unknown: Thrombin-sensitive sequence
CPRSC

SEQ ID NO: 1538 - skipped

SEQ ID NO: 1539 - DNA, 4673 bp, Taeniopygia guttata
  source 1..4673: mol_type = unassigned DNA
gtctagttacaactgggcatcgctgcagagatcgcacctcctcgtggtcccgctggtagcccttcgaagggtgactaagtcgatctctgccccaggtacggagccgttgggactcaccagtccaacgtaactcctgcctaaattcggtgaaacaaattcctcggtaaaaagccccatggcttcttgcccgaaacctggccccccggtttcagcaggggcaatgagtttggaaagtggactgaccacccactccgttctcgccatcgaacgtggtcccaattcgttggcaaattccggatcagactttgggggggggggtctggggctaccgttacgcctattgagggtatcggtcggcactcagacctcccgctccgactgggtagacctggtgtcctggagccacccaggacccacgtctaagtcccagcaggttgacctggtgtctttatttcctaaacaccgggttgacctgttatccaaaaacgaccaggtagacctggtggctcaatttttaccatctaaatttccccccaatttggcagaaaatgatttggctttgctggtgaacttagagttctacagatcggatttgcatgtgtatgagtgtgttcattttgctgcacattgggagggattaagtggtttgcctgaggtgtatgaacaacttgcaccacaaccgtgtgtgggagaaactttacattctagcctcccacgagacagtgaactgtttgtgcctgaagaggggagcagcgagaaggagagcgaggacgcgccaaaaacatctcctccgacgcctgggaaacatggtttggaacagactggggaggaaaaagtgatggtgactgttcctgacaaaaatccaccttgtccttgctgtggtacccgggtaaactctgtgttgaatctgattgaacatctgaaagtgtcacacgggaaaaggggggtttgttttcggtgtgcaaaatgtggaaaggaaaatagtaactatcacagtgttgtttgtcattttccaaaatgcaggggtccagagacggagaaagccccagctggggagtggatttgtgaggtatgcaacagagattttacaaccaaaattggcctgggacaacacaagagattggcacacccagcagtgagaaatcaggaaaggatcgttgcttcccaaccgaaagaaacatcaaatagaggtgctcacaaaaggtgctggacaaaggaggaggaagaattactaataagactggaggctcagttcgagggaaacaaaaatattaataagcttattgcagaacacataaccaccaaaacagctaagcagatcagtgacaaaaggcgattgctgtccagaaagccagcagaggagccacgtgaggagcctggaacgtgtcatcacaccaggagagcagctgcgagcctgagaacggagcctgagatgagtcatcacgcccaggcagaggacagagataatggacctgggagacgccctctgccaggcagggcagctgccggagggagaacaatggacgagataagacgccaccctgataagggcaacggacagcagagacccaccaagcaaaaatcagaagaacagctgcaggcttactataaaaagacactagaggaacgactttcagctggggcacttaacaccttcccccgagcattcaagcaggtaatggaaggccgggatataaagctagtaatcaatcagacagcgcaggactgcttcggatgcctggaatccataagccaaataagaacggcaacccgagataaaaaggacacggtgacccgggagaaacacccaaagaaaccttttcagaagtggatgaaggacagagcaatcaaaaaaggtaattatcttcggttccagcgtttattttatcttgatagagggaaactggctaaaatcattttagatgatattgaatgcttgtcttgtgacataccactcagtgaaatttattcggtttttaaaacaagatgggaaacaactggtagctttaaaagccttggggactttaaaacttacgggaaggctgacaacactgccttcagagaattaattacggctaaagaaattgagaaaaatgtgcaggaaatgagcaaaggctcggctcccggtccagacgggattactcttggggacgtcgtaaagatggatcccgagttttcccggaccatggagattttcaatttatggttaacaactggtaaaatcccggacatggtgagggggtgcagaaccgttttgattccaaaatcatcaaagccggatcgtttgaaagacattaataactggagacctatcacgatcggttccatcttgctgagactgttctccaggattgtaacagctaggctgagcaaagcgtgccccctgaacccaaggcaaagaggctttatcagagcggcgggatgctctgaaaacttaaaactcctgcaaactataatttggtcggccaaaagagaacacagaccactgggtgttgtattcgtggacatcgccaaggcttttgacaccgtaagccaccagcacatcattcatgctttgcagcaaagagaggtggatccccacatcgtcggtctggtgagcaatatgtacgagaacatcagtacgtatatcaccacaaagaggaacacacacacagacaaaatccagatccgggttggagtaaagcagggtgacccgatgtcgccccttttatttaacctggcaatggaccctctattatgcaagctggaagagagtggcaaaggataccaccgaggacagagcagcatcacagcgatggcatttgcagacgatctggttttgctgagcgactcctgggaaaatatgaatacaaatattagcatactggagaccttctgcaatctgaccggtctcaaaacacaggggcaaaagtgccacggcttttacatcaagccgacaaaggactcttacaccatcaatgactgcgctgcctggactatcaacggcacacccctgaacatgatcgaccccggcgaatctgagaaatacctcggcctgcagtttgacccgtggattggaatagcaaggtccggtctctccacaaaactagatttttggcttcagcggatcgatcaagcaccacttaaacctctgcagaaaactgatattctcaaaacatacaccatccctcggctgatctacatagctgaccactcagaagtgaaaactgcactactcgaaacccttgaccagaagatccggacagcggtcaaggaatggcttcacctacctccgtgcacctgcgatgccatcctgtactcgagcacgagagacggcggtttgggcatcaccaaattggcaggactgatccccagcgtgcaggcccgtagactgcatcggatcgcacagtcatctgacgatacgatgaaatgcttcatggaaaaagagaaaatggaacagctgcataagaaattgtggattcaagctggaggggacagagagaacataccctcgatttgggaagcaccaccgtcgagtgaaccaccaaacaacgtgagcacaaattcggaatgggaagcaccgacccagaaagataaatttccaaagccttgcaattggaggaaaaacgaattcaaaaaatggaccaaattggcatcccaaggccgcggaattgtaaattttgaaagagacaaaattagtaaccattggatccaatactacagacgcatacctcacaggaaactcctcactgcactacaactcagggccaacgtttaccccacgagagaatttctagccaggggtagacaagaccaatacatcaaggcgtgtaggcactgcgatgcggacattgaatcctgcgcccacatcatcggcaactgcccagtgacacaggacgcccgaatcaagaggcacaattacatctgcgaactgcttctcgaggaggcgaagaagaaggactgggtagtgttcaaggaaccgcacataagggattccaacaaggaactgtacaaacctgacctgatatttgtgaaggatgcccgtgcacttgtcgtggatgtgacagtacggtatgaagcagccaaatcatcgctggaggaagccgctgcagagaaagtgagaaagtacaaacacctggaaacggaagtaagacatctcacgaatgcaaaggacgttacttttgtgggctttcccctaggagcgcgggggaaatggcaccaagataactttaaacttttgactgagcttggcctctccaaatcgaggcaagtgaaaatggcagagactttttccacagtagcgctcttttcatctgtggacattgtacatatgtttgccagtagggccagaaaatctatggttatgtaattcaggttatttagatgcttagtttttgtacctttcttgttttgtttaggattttgatagtgttagtatttttatatttttgtacgattgcataatgttcttttttatacagttctgttttaataaaatagacgatagctagagacgttagggcagccacaagccagttaggtagcggatagtaggtaggaacagacttttactatttcataacgcgtcaattaccacctgatttggaccaattcacgggatttgtccaaggtggacgggccacctttacttaacccggaaaaggaacatatataatttatgtgtgttcgataaa

SEQ ID NO: 1540 - DNA, 4478 bp, Geospiza fortis
  source 1..4478: mol_type = unassigned DNA
agacttaagtgagtttggttacaactgggcatagctgcagagaccgcgcctcctcgcggccccgctggtaagcccttaacagggtgactaagtcggtctctgccccagtccgggagtcgatgggactcaccagcccaacgattccttccaaaatttcggtgaaacaaatttctcggtgcaagtcgcaaggcttgtcacccgaaacctagccccccggtcggtcaggggcaacgggttcggaagtgggatggccacccaccccgttcccgcagacgaatccggccatgaatctgatccattccttgtagggaggagctgcggacaaccggcacgccttactaggcaatcggttggcacccagacctcccgagatgatattttaccatctaaaaccaccaaattgacagagaatgaattggacttgctggtgaacttttctttagaattgtataggtcagatctgcagggatttgtgcaggaggggattcatttttctgtgaatagggaggtgttagaggggtttcctgaggtgtatgaacaacctgcaccacaaccggcagtaggggacgatttaaacaccagtctcccaccggacaataatatatgcgtacttgagaagggtagcagtgaagcagtggaggatggcacaccggaggtagcgcaccccgtgcctgaaacccagggcaaagagtcaccgaataacatcgtgatggtaactcttcccaacaaaaatccaccatgtccttgctgtagggtcagactgcattcagtactggctctgattgaacatcttaaggggtcgcatgggaagaagagggcatgctttaggtgtgtcaagtgtgggagggagaactttaactatcatagtactgtttgtcacatcgcaaaatgcaagggaccaaaagttgagaaggccccagtgggagagtggatctgtgaggtatgtggtagggactttacaaccaaaatcggcctgggacaacataaaagattggcacatcccttggttagaaaccaagaaaggatcgatgcttcccaaccgaaggagacatcaaacagaggagcccacaagagatgttggacaaaagaggaggaggagatgctgataaagttggaggtacagttcgagggacacagaaacatcaataagcttatcgcggaacacttaacaactaaaacatccaaacagattagtgataaaaggagactattacccagaaaacaattaacagatctaagtaagggagtggctggacagaaggtgctggacccaggactgagtcatcaaccccagctgggggtagttgacaatggacttggtgggggtcatctgccaggggggccagctgctgaaggaagaacaatagagccattaggacaccaccttgataaggataacggtcaccgggaaatcgctgaccagcacaaggcagggaggctgcaggcccattaccgaaagaagataaggaagcgcctttcagaagggatgattagcaacttccccgaagtatttgaacaactactggactgccaggaagcacaaccattgatcaatcaagcagcgcaggattgctttggatgcctggattcagcaagccagataaggaaggcgctccgaaaacagaacacacagaaagaccagggggatcaacccaaaagaccagctcagaagtggatgaaaaaaagagcagttaagaggggtcacttcctccgctttcagaaattatttcatcttgacagggggaaattggcaaagattattttggacgacgtagagtgtttgtcctgtgatataccacccagtgaaatttattcggtattcaaagcccgatgggaaacacctggacagtttgctggccttggggatttcgaaattaataggaaggcgaacaataaagccttcagggacttaattacggccaaagaaattctcaaaaatgtgcgggagatgaccaagggctcggccccaggtccagatgggatcgcgcttggggacatcaggaagatggaccctgagtacacccggaccgccgaactcttcaacttatggttaacatctggtgagatcccggacatggtgagggggtgcagaactgtgttaatccccaaatcgtcaaaaccggaacgcctgaaggacatcaataactggagacccatcacgattggatccatcttgctgagacttttctccaggatcataacagcgaggttaacaaaggcgtgccccctcaaccctaggcaaagaagcttcatcagtgcggcaggatgctccgagaacttgaagctcctgcaaaccataattcggactgctaaaaatgaacacagaccactgggtgttgtattcgtggacatcgccaaggcctttgacaccgtgagccaccaacacatcatacatgtattgcaaaggaggagagtggacccccacatcattggattggtgaaaaatatgtacaaagacatcagtacggttatcaccacaaagaagaacacatacacggacaaaatccagatccaggttggagtgaagcaaggtgatccgctttcgccccttctattcaacctggcgatggaccccctgttgtgcaagctggaagaacacggcaaaggattccaccgaggacagagcaagataacagcgatggcattcgctgatgacctggtcctgttgagcgattcctgggaagacatgaatgcgaacatcaagatactggagaccttctgcgacctcaccggtctcaaaacacagggtcaaaagtgccacggcttctacatcaagcctacaaaggactcttacaccgtcaacaactgcgctgcgtggaccatcaatggcacacccctgaacatgatcaaccccggggaatcagagaaatacctcggcctgcagtttgacccctgggtgggaattgcaaagaccagcctccccgaaaaactggacttctggctcgaacgcattgatcgagctccactcaaaccatttcagaaactggacattcttaagacatacaccatacctcgactgacctacgtagctgaccactcagagatgaaagcgggggcccttgaagcccttgaccggacaattcgatcggcggtcaaggactggctgcacctaccttcgagcacctgtgatgccatcttgtacacgagcatgaaggacggtggtttgggagtgaccaaattggtgggactgattccgagtgtacaagcccggaggctgcacaggattgcgcagtcaccggaggagacgatgaaagacttcctggaaaaggcccagatggagaagatgtacgagaaattgtgggtccaagctggagggaaaagaaagaggatgccgtcaatttgggaagcgctcccggaggttgtaccatccatagacacagccacaacttcggagtgggaagcaccgaaccctaaaagtaagtaccctagaccttgtaattggcgcagaaaagaatttaaaaagtggactaaattaatagcccagggctggggaattaggtgttttaagggggacaaaattagtaacaattggattcgacattatagatacatacctcacaggaaacttctcactgccatacagctccgggccagtgtgtaccccacaagggaatttctcgcgcgggggagggaagataactgtgttaagtcttgtaggcactgtgaggcggcagaggagtcctgtgcccacatcatcggcatgtgtccagtcgtgagggatgcccgaatcaagaggcacaatcgcatttgcgagaggctgatggaggaggcggggaagagggactggacggtgtttcaggagccgcacataagggacgtcaccaaggaactgtacaaaccggacttgatattcgtgaaagaaggccttgcacttgttgtggatgttacaatacggttcgagtcaaccaagacaacgttggaggaggctgctgcagagaaggtgaacaagtacaaacatctggagaccgaagtacggaacctcaccaacgctaaggacgttatctttatggggtttccccttggagcgcggggacaatggtacaataagaactttgaacttttggacactcttggcctccccagatcgaggcaggacattattgcaaagactttatccacggacgcgctcatttcatctgtggacattatacatatgtttgccagtagaggcagaagacagcatgcttagggtagataatctttgtatagtggggggggatctcatgtaccgggtttcttttatttgattttcaataaaacagacggtagctaggttcgcaaggcagccacaagccaaagataggtagggtgctcatagtgagtagggacagtgccttttgattcacaacgcgtcaataccatctgacacggatacccttaccggacttgtcatgatctcccagacttgtccaaggtggacgggccacctttacttaacccggaaaaggaacatatattaattatatgtgttcggaaaa

SEQ ID NO: 1541 - DNA, 4542 bp, Zonotrichia albicollis
  source 1..4542: mol_type = unassigned DNA
cgacttgagaaggtctggttacaactgggcatagctgcagagatcgcgcctcctcgtggccccgctggtaagcccttaacagggtgactaagtcgatctctgccccagtccaggagccgctgggtttcaccagcccagcgattccttccaaattcggtgaaacaaattcctcggtaaaagccgcgtggcttattgcctgaaacctggccccccggtttcagacaggggcaaagagttcggaagtggactgaccacccaccccgaacccgagagcgaatctggtcatgacccaactgtcccaaatcctggtccgtctcttggagcgggggaaggtgcacagccactacccttactcagggtatcggtgggcacccaaacctgtgaagaggactttataacatctagaccaaccaaattacccggaattgaatcagaattaggcccgctggtgaagttttctttagaggtttacaggtcagatcttaagggggatgtgcaatttgaggggattcattttccagataattggggggtactggaggggtttcctgaggtgtacgaacaactggcaccacagccaaacgggggagacgagttaaatcatagtctcccaggggacagggagggggatgtacttgagaaggatagcagcgaaaaggagaaggaggctgcaccagaggcattgccctcagtgcaaagggcccgcagtgaacagttgccagataacatcgtaaaggtgactgttcccgacaaaaatccaccatgtccctgctgtggtgtccgcttaaactcagtgttagctctgattgaacatctgaagggctcacacgggaggaggagggtgtgctttaggtgtgccaaatgtgggagggagaattttaaccaccatagtactgtttgtcattacgcaaagtgcaaaggtccacagattgaaaggccaccagtgggagagtggatctgtgaggtatgcggaagggacttcacgaccaaaattggcctgggacaacacaaaagacatatgcatgcaatggtgagaaaccaggaaaggatcgatgcttcccaaccgaaagagacatcaaatcgaggagcccacaagaggtgctggacgaaggaggaggaagaactgctcatgaagttggaggtacagtttgagaatcacaaaaacatcaataagcttatcgcagagcaattaacaactaaaacagctaaacaaattagtgataaaaggagaatgctgctcaaaaaaggtagggggacaactggtaatttggaaacagagcctgggatgagtcatcaatcgcaggcaaaagttaaggacaatggactgggtggggaccatctgccgggaggaccagttgtcgataagggaacaatagggaagccaggacaacatcttgacacagataacagccatcaaataactgctggcaagaagaaagggggagggctgcaggctcgttatagaaggagaataatgaaacgattagcggccgggacaattaacatcttccccaaagtgtttaaagaactgattaacgaccaagaggcgagaccgctaatcaatcaaacaacagaagactgctttggcctcttggactctgcatgccaaattagaacggcactccgggagaagggcaaatctcaggaggaacgaccaagaaaacagtatcagaagtggatgaagaagagagcgattaaaaggggggactatctccgcttccagcgattattccatctagacagggggaaactggcgagaattatcttggacaacactgagagcttgtcttgcgatatatcacccagtgaaatttattcggtattcaaggccagatgggaaacacctggacacttcaacggccttggggactttgaaattaaagggaaggccaacaacaaagccttcagggacttcatcacggctaaagaaattgaaaagaacgtgcgggaaatgagtaagggttcggcgccaggtccagatgggatcgcccttggggacatcaagaagatggatcccgggtattcccggaccgccgagctattcaacttgtggctgacagctggtgacatcccggacatggtgagggggtgcaggactgttttgatcccgaaatcgacgacaccggagcgcctaaaggacatcaacaactggagacccatcacgattggttccatcttgctaaggctgttctccaggatcataacggcgaggatgactaaggcgtgccccctcaacccgagacagagaggcttcatcagtgcgccgggatgctctgagaacctgaaactcctgcaatctataattcggactgccaaaaatgagcacaagccgctgggtgttattttcgtggacattgctaaggcttttgacaccgtgagccaccaacacatcatacacgttttacagcaacggagggttgacccccacattgttggactggtgaacaatatgtacaaggacatcagtacgtatgtcaccacaaagaagaacacacacacggacaaaatccagatccgggttggagtgaagcagggtgacccactatcaccccttctattcaacttggcaatggaccccctgttgtgtaagctggaagaaagtggcaaaggattccatcgaggacagagctcaataaccgcgatggcgttcgccgacgatctggtcttgttaagcgactcctgggagaacatgaaagagaacatcaaaatactggagaccttttgcaatctcaccggtctcaaaacacagggtcagaagtgccacggcttttacatcaagcctacaaaggactcttacaccatcaacaactgccctgcatggaccatcaacggcacacccctgaacatgatcaaccccggggagtcagagaaatacctcggcctgcagatcgacccatggactggagtagcaaaatacgatctctccacaaaattgaaaatatggctcgaaagcattgaccgagctccacttaaacctctgcaaaaattagacatcctcaaaacatacaccattcctcgactgacctacctggctgaccattcagagatgaaagcaggggctctggaagcactcgaccagcagattcgaacagcggtcaaagactggctgcacctgccctcgtgcacctgtgatgccatcttgtacgtgagcacgagggacggcggtttgggtgttaccaagttggcgggactgattccaagtgtgcaagcccggaggctgcatcgcattgcgcagtcgccggacgagacgatgaaggacttcctagagaaggcgcagatggagaagatgtatgagaagttatgggttcaagctggaggcaaaaagaaggggatgccgtcaatttgggaggccctaccgatgactgtaccacccactaatacaggtaatctttcggagtgggaagcaccgaaccccaaaagtaagtacccaaaaccttgtgattggagaaggaaagagcttaaaaagtggacaaaattggagtcccaaggtcgtggagtcaaaaattttaggaatgatacaattagtaacgattggatccaatattatagacgcatacctcacaggaaactcctcactgccatacaactcagggccaatgtataccccacaagggaatttctcgcgcgggggaggggtgataactatgttaagttttgtaggcactgtgaagcggaccttgaaacctgtggccatatcatcggcttttgcccagtaacgaaggacgcccgaatcaagaggcacaatcgcatatgcgacaggctttgcgaggaggcagctaagagggaatgggtggtcttcaaggagccgcacttgagggatgccaccacggaactgtttaaaccggatgtgatattcgtgaaagaggaccgtgcactggttgtggatgtgacagtacgatatgaatcagccaagacaacgctggaggcagctgctatggagaaagtggacaagtacaaacatctggaggcagaagtgaaggaactcaccaacgcaaaggacgttgtttttatggggttcccccttggagcgcgagggaaattctacaaagggaactttaacttgctagagactcttggcctcccaaaaacgaggcaattgagtgtggcaaagactctatccacgtacgcgctcatgtcatctgtggacattgtgcatatgtttgccagtagatctaggaaaccaaatgtctaggtagtcacattgcactttctgtaacttgcactgggtgtgggatgtgggcctggggtgtgggttatggggtatatatgtgggatattctggtgggaatgtccattcactgtatgcctatctttttaataaaaagacggtagctaggttcgcgaagcagccacaagccaatagccagttaggtagctcatagtgggtaggtgacaggaacctttgactcagaacgcgtccattaacatctagaacggaccaaacttcggacatgcaccgattaaccggatttgtccaaggtggacgggccacctttacttaacccggaaagggaacatatatagttatatgtgttcgtaata

SEQ ID NO: 1542 - DNA, 5183 bp, Danio rerio
  source 1..5183: mol_type = unassigned DNA
aatcccccctacccaatccccccgtcgtgacctccaggccaggaatcacgagcgtacgacagtggccatccggcaatgacaatagcgtgactaacgacaatgagtcagatccatgacccttggagtgggttaacctccgcctctttaaaaacatggaaagtacagcaaaaggaaagtcatactggatggcccgtcgcccagtagaaggtgccacggagggatctttgggtcgggtccctttcgtaacgcgagatcctaagcgcaaaccagaggctaaacgaacacttacgcatggcttaggactacgagaatgctcggttgtcttgacacgcctcatcgaggggcgtcgaggtcgcgatcacacaccatcaggatggaacgcacagcgcggcatgccaaacgacgaaagctcggtcgaggagcccaatgggccgataccatctaaccccataccaacgggcacccaagccctgcctgaacctatggcggacggggagcagggggagcacccgggagtggtggtgaccctgccgctcagggacttaaactgccccctatgtggcgggtcggcgagcaccgcggtgaaagtgcaaagacacttggcatttcgccacggaacagtgccggttagattcagctgtgaatcatgtggaaaaacttctccgggttgccattccgtcctctgtcacattccgaaatgtcgcggaccgacaggcgagccgcctgagaaagtggttaagtgcgagggatgcagtaggacgtttggcacaaggagagcgtgtagtatacatgagatgcacgttcactcagaaatccgcaataggaaaagaattgctcaagacaggcaagaaaaagggacctcgacagatggagaggggagagctggagtcgaaagggctgacgctggggaaggtccctctggggaagggatcccccctaaacgtcccagacgtgcgagaacgcccagagaaccgtctgagccccccgcgaatccgccgattctctcgccacaacccgatctgcccccaggaggcctccgggacctactccgggaggtggccagtgggtgggtaagggcagcgagagacggaggtacggtgattgacagcgtgctcgcagcatggttggatggcaacgatcggctccctgagctggttgacgcggcgacgcaaaggacactgcagggcttacctgcagggaggttggcccgaagacccgcaacttttgttgcgcctaaccggaggagaggcaggtgggggcgccggctcaaactgctcgctaagcgccgcgcctaccacgattgccaaattcggttccgaaaagacccagcccgcctagccgcgaacatcctagacggcaaaagcgaaacaagttgcccaatcaatgagcaagcgattcatgagcactttcgaaacaaatgggcaaatccaagtccatttggtgggctgggacgatttgggacggaaaacagggccaacaacgcccacctcctcgggccaatctccaaaagcgaggtccaaactagcctccgaaatgcatcgaacgcctccacaccaggcccagacggcgttgggaaaagggacatttccaactgggatcctgagtgtgagaccctcactcagctgtttaacatgtggtggttcacaggtgtcatcccctctcgcttgaagaaaagtcgtacggtgcttctgcccaagtcctcagacccaggagcggagatggagatcggcaactggagaccaatcaccatcgggtcgatggtcttgcggcttttcacaagggtgatcaatacgagattaacggaagcctgtccgttgcacccaagacagagagggtttcgacgaagccccgggtgttcggagaacctggaagtactcgaatgtctcctccgacactccaaagaaaagcgcagccaactggcagtggtattcgtcgattttgcacaagcgtttgacaccgtctctcatgaacacatgctgtcagtccttgagcagatgaacgtggatccccacatggtaaatctgatccgggagatttacacaaacagctgcacaagtgtcgagctaggccggaaagagggaccagacatcccagtgagggttggtgttaagcaaggggatcctctgtccccgctgcttttcaacctggctttggatcctctcatccaaagtctcgaacgcacaggcaaagggtgtgaggccgaaggtcacaaagtgacagctttagcgttcgcggatgacctggcactggttgcgggctcgtgggagggaatggcacacaaccttgcgcttgtagacgaattctgcctaaccaccggcctcacagtccaacccaaaaagtgccacagtttcatggtcaggccctgcagaggtgccttcacagtgaacgactgccccccatgggttctggggggcaaggccctgcagctaacaaacatcgaaaactccatcaaatatctgggagtaaaagtcaatccttgggcggggattgaaaagcctgaccttacagtggcactagaccgatggtgcaagcgcattgggaagtcactgctcaaaccctcacagaaggtatacattctcaatcagtttgccatcccgcgactcttctacctggctgatcacggtggggccggcgacgtcatgctccagaacctggatgggacaatcaggaaggcggtgaagaaatggctgcatcttccaccgtcaacctgcaacgggctgttgtatgccaggaactgtaatggtggcctcggtatatgcaagctcactcggcacatcccatcaatgcaggcgagacgaatgttccgcttggccaactcatcggacccgttgatgaaggccatgatgcgcggctcccgagtcgaacagaaattcaaaaaggcctggatgcgggccgggggagaggagagtgcgctcccacgggtgttcggggcgaatcagtaccaggaaggggaggaggtcgctaacgatctggtacctcgctgcccaatgccgagcgattggagactggaagaattccaacactggatgggcctgccgatccagggtgtgggtatagccggcttcttcagaaacagggtggctaacggatggctcaggaagccggcagggttcaaagagcggcactacatcgccgctctacaactgcgagcatgtgtataccccaccctcgaattccagcaaaggggcaggagcaaagcgggtgcggcctgcaggcggtgctcatcccggttggaatccagctctcacatcctcggcaaatgtccggcggtgcagggagccagaatcaggcgtcataacaaaatatgcgacctcctgaaggccgaagccgaaacccggggttgggaggtacgccgggaatgggccttcagaactccggctggggaactgagaaggctcgacctggtactcatcctcggggatgaggcattggtcattgacgtcacagtaaggtacgagttcgctccggataccctccagaatgccggaaaggacaaggtcagctactacggcccgcacaaagaagcgatcgctcgggagctgggcgtaagaagggtcgacatacatgggtttccgttgggtgcacgcggactttggctcgccagcaactccaaagtgctggaactgatgggattgagcagggaaagagtgaaggtcttctccagactcttgagtcggagagtgctcctgtactctatcgacatcatgaggacattttacgcaaccctgcaatgaaaatcccagcgggatacagcaagaaggtatcggatctaataaggttgagcgaggagagggtggagatcctttggggggggtcgggctaagttcccctctcgggtcctcccacggtgacgctctacccctccctcctcgctcgtagaacccaacggtgaacacggttggcaggatgaagtgacgtgaggggtaagacatgcgtacgtgagcgcgcatttttgctgttctctggactgggtttcgtccccctcacaaccatcacttacactataggggcacagcggctcctacctccctccctatgacccccccttcccataccgatccatggctgttctagtctggaccgagggtcggacggggcatttgaaggtagctggaatcctccgctgctgcgagcctgaggtcgatggttagaggtgaaatacttgggaggagacacagcctccggagagcccctcccgggtggtcatcatggcaaccgggtgaaaccttacggtttcacttacgaaacagcaccataacagcgccgtaatagcgcaccggtgtgactactgtccagtgctgatattctcatctggagaatacaacacgggtaatggcagagtattcaaaacccaaatgtttacgatcgaccaacggagtcgttcccttgcatctaggccggacccgaaactgccgtaattgcccgtccccaaggtagcctcttagaaaaccgaagcccggtcggggcggtggttgcggcggcgctgcgggggcctgctgctcgggcggcgtcggtgtgccgcggtggttgcggtggtgcggcggggatctcggtccttgcggtgccgctgtgccgccgcggtcgcgtcggtggcgctggggtggtggcccgagtggcgtcggcgtgccactgcccatagtcgcccgcgggggcgaccgatctggaggggcgagggggctcgcgggactttaacgagaaacggaacgcaacttctcgcatcgctcccgggactttcccccctcgttcagccgagggatgccaaaaggcatgaaaggtaagtaccataccggtccgcaaaactctcttctgactcggttctctgttggttttctagagtaacaacgaggtggaggagagggacatggcagggactcccattcgtgccagcgggtggggacagatcgaaggaacggttcgagggcgtaacagacgagagggaatccggtcacacattgatgccatgcctaaataggcgaggtttgtatttctactttgtgggttcagtatagtcggagcatatggtcggttgtcccgttgttttcacggcgggcaagcgactatcatgataaagtagaatgggagacgggctccctgacaaacccggaaaggcgcccccccgtggttcgtagcagctgacggatcacgctcgaagaaaaatgagtgagaggggacgccgcaaccac

SEQ ID NO: 1543 - DNA, 6020 bp, Gasterosteus aculeatus
  source 1..6020: mol_type = unassigned DNA
catattggggtctcaggaggagacacagggtctgttgcggctccggtaaacggtaccggagtcggttaagcatcgtttgggcccgcctccacgtggtggtccgcggtaacaccaatagggtggctaagaggcccagtaatttccccgaattgtcttcccccccgcgcgggggggacccccctttagtgtcggagcggtcgcgcctccgcgtttggggtgtcgcaggcgtgagccttcgtccccttaagttcagacggtcccggcttcttgccgggccaacccccggtgcagcgttctcccatgttggatcggcacccagccccgggtgccatgcgagttcagacattttgtttatgtatcgtctgcgtggttgacttgctaagctcatttcctcctctcactgcgtccccccaggtgctgatcggttgaagaggattcgtcgttgacctcggcggtgaatttgggattgtattatacaggtaggtatagagggcgtgcggatgttgcgtggcggtgttggtactcccccggctgggggagcgggtgcggtggggccaggcatggcctcgccgggtggttgcagtgtccggttcagtcccggagggaggcgactgcttggccacaggactggagggttgagtccctccgtgtcctggaggctcaagcgactgtctgtctctctgaggcgctggagcgggcctgggctgctaggtgcggatggtgcggggggaggcgctgcggtggcctcccccaggggtacgcaggtcctgggaagtggggccgggcgtcggtggcttgggcacgggtcgcgagggtcttctccttctgcggcccgggggctaaggcggctgacggtacggttgaagcgactcagcggtggcctgttgtcccctaaggcgtgtcgggatgcggaagaaggaagctccagcagcccagggttccggaatccaaaaggtctcgggggaagggggttgacgcctctcggatcccgtagattttgtcggctgaccgtctccctgaatcgctggaggggcagtctggtgaagttgaacgctagtagcagggcctccggccggaggacccctgtgaaacccgcttgtgactctagagccggacggggctcggagcatgcggagggaggtggagtgagcgctgcacctatggtgttgcgcagtcggcgtaagctcaccttctctgtggatggcgactctaactccggggatagggcccggagcgggtccgtctctgcagcccgtcctggccacttgttggtggatggtgagagtgcgtcctcaagatctggccccgcgggggatgccaggttggcggggccttctacgcggagtaggaggaagggttgccttcccccggtcgactttgaaaacccgaagaagcgcacacggttgatggctaagatgacgaatggtaatcctacctcgcacgtcccttgccctgccccgtgctcaaatgggcatgaaggaggtgggcgagttgcggtgatcgaggggcggctgccggagttaagcggtagtaggatctctggaatacagccagccctgcctgttgaaaccagctttgtcggccaatcgactggccggggcgcggacggcgatgcgaatgcgaatagtagcccgccttctcctaatctgggcggctcggttgggatggtgcctgccgtgcgtgatggtaccccgccgcttgggcgtccaggagaggatcactcgcgggagtgtgcagggggaaatactcccctctggatgctggaggacagtttccggtgtgactactgtcctagggaattcggcacaagagcggggcgctcgttgcacatgcgcagggctcacctggccgagtacgacggggcaggtttctgttggggtgaacgtctcagtgaattcgccgctacgcgcctctggtcgacggaggaaaccaaaaagctggccgtgttttgtgagaggggtgtgccctcaccgtcggaatgcagagccattgcagcctctctgggcgcaggaaaaacacatcatcaggttagatcgaagtgtcgactggtgttcgaggccattcggcggcgtgaattgcttgaggtggctgctgccacggagcgtttggagaaaagcgctaggcggaagcagcccgccgtaccaccggcacccgtacacggagtgagaggggtcctgcggggcctactagggaagcgggtgccgagagagggtggtaccacaggcagcacctcagcaaggatcgtcaggagagacgactgccgtcagggggcagttgcgtcggcttctctcaatctgatcagaaggctgggtcgaaaggcaacgggccgctccggcaggagacgggtccttggacgcccacccaggatggatgtaaggcgtagcgtgaggatgaggaggatgcgcaggttcctctatcggttggcccggctgggctgggccaagttggctatgtttgtcctggacggacagatgggggcgagctgccccgttccactcgtcgaagtgtcggcggtcttccgggagaggtggagcatagtcagagccttcctgggtctgggtcagttcgggggcttcgggactgccgacaacgcaggatttgggaagctgatcgatccggctgaagtcagggcccatctccagtccatcaagaaccggtcttccccgggcccggatggcatcaccaaggtggcgctgtccaaatgggaccccgaagggattaaattggcgcacatgtactcaacatggttggtatcggcaggcatccctaaggtcttcaagaagtgcaggacgacacttatcccaaagaccggggacgttagtctacatggtgacgtggggcaatggaggcccataaccattgcgtccctggtcctgagactctattcgcggatcctgacggaaaggatgacagtggcctgtcctagccacccgcgccagaggggcttcattgcctccccgggctgttcggaaaacctcatgctgttggaaggttgcatgagtctcagcaaggcaggaaatggctccctcgcggttgtgttcgtcgactttgcgaaggccttcgataccgtctcccacgagcacctcctgagtgttctggtgcagaaaggcttggaccaacacatggtggagttgatcaaggactcctacgagaacagcgtgaccaaggtgcactgtcaggagggttgttccactgacatcgccatgaaggtgggagtgaagcagggtgactccatgtcccctctcctctttaacctggcgctggatccgcttatccagcaacttgaacgcgagggccggggcttcccagtaaatgggaagtccattactgcgatggcatttgcggatgacttggccatagtgagtgactcttgggaaggcatgagagccaaccttgatatcctggtggacttctgcgagcttactggaatgcgaacccagcccagtaagtgccacgggttcctgattgagaagagtggcagcaggtcgtacaaagtgaacaggtgcgaaccgtggctgctgaacgacacagctcttcacatggtcgggcctaaggaatcaatcaagtacctgggcgtccaggtgaacccgtggacagggatcttcgctgaggatacggttgccaaactacgacagtgggtagttgcaatctccaagacgcctctacgtccgcttgacaaggtgtccctgttgtgccagtttgccgtaccgagggtcatcttcgtggctgatcactgcatgctatctgcgaaggccctgacagaaatggataggagcataagacaagcagtgaagaggtggttgcacctggccaggtgtaccacgaacggcctcctctactcaaggaaatccagcggtggtctgggtatcccaaaattgtcgatgattgttccggccatgcaggccaggagactcctgggcctgtcccgttctaaggacgagacggtcaggtggatgtttctggagacaactgatcacgtggcgtttgagagggcatggctgagggctggagggtcgccagatgaggtaccggagctgggtccggatctggtggagggctcccctgcggaggggaacgctgaccctgtcagcacggtgaggccaaggaagcgcatagtcccgtgtgactggcgtcaagtcgagttcgacagatgggccggtcaattggtgcagggaaaagggattcggacgttcgaagcggacaagatcagcaactgctggttgtacgactacccgccaaacaagctgaagcctggggattttacggcggctgtccagcttagagcgaacgtttacccgacccgggagctagcgggtcgcggaaggaccgatacgatagatgtctgttgtcgacactgtggggaggccccagagacttgctggcacatccttgcgctctgcccgaaggttaagcggtgccgtattcagaggcaccacaaggtgtgccaggtcctcgtcgcggaggctgagcgccatggatgggaagtggaaagggaaaagcgctggatgctgccctccggggagtgtgtcgcgccggacctgatctgctggttggatgagctggcgctcattgtcgatgtgacggtgaggtacgagttcgatgaggagtcgctagaacgcgcgcgaatcgagaaggaatgcaagtaccgccctctcattccagtgatcagggcgagcagagttcagacgaagaaggtgacggtctatggcttccctctgggagccaggggaaagtggcctgctaagaacgagctgctgctcgccgacctcggcctgagcaaggctcggactcggagttttgctaaactcctgagccgcagagttctcttacattctctggatgttatgaggacgtttatgcgttaaggaggggagtaggtctctactctgacccgaagggcccccccgtttcagacctgattctaggctacctgtgcctaattgggggggtcccaaagagatgttgtctgttgtagaagggtttgcgccactgactgcacggaagggtgggcctcgacaggtaggggttacatgactccgtgctgctcagcagacccgcgcctctgagaccgggtagggctacttgaacaagcgacgccctggtgtatgtccgtatcctaacctggtttgggaaagccgataccggcaatgcccgccacaggtgtcgcgcaccccacgggatgacgtatgggccccgggggacctcatggatactccactggacttgcacaatcctggtgtactggatgcagcgacgttggtgacataagcaatcgctaagtcggggtaggggaggtggggacctcggcacggctgtaggaacgggtgtatgggctccggcagccgtcgtcactcccatacaacacaggggctgcatcctggtggccggtgctagttggttctggaagcccgcccgggctggttcgcagaagcagggtgcgcccagggtaggtttggtatatctgggtccggtgcgatacctatcgatgggcagcgagggccgcctcgtgacgcgctgtgtggagctggagccggcctgggtatgaacagttcttgcggatgtggcgtagctagatagtacccgtggttgtgggcgtggtgtcgaccaaatgttgtcctgtgtgcacataggccaagggttacgtgggtggcagtcagaagcacccgcacctggaagtgattgccccgggatcccggctctctgtgaagagctaccttgaggaaaggtgttccgctggaactcaagaccctacagtaggggatatcaactggctttgaggtgctgtgattccggaaccagggcgagggcgagtacttagagcatgtccaaaagcccggggaacgttccgggggcctgcttgggtcgttggacccacatccgtaaaacgatggatctcgcgtcggcgctcgggagaacttcccgcatgaacgctgattgcatgtgagaacgcccccacggcggcggggcaggcgctccccctgggtgtaaggctcgggggggtcacggctccgctctaaaag

SEQ ID NO: 1544 - DNA, 4185 bp, Bombyx mori
  source 1..4185: mol_type = unassigned DNA
gggcgatacgcataattttaatttcccgattgaaatccagtcgtcttaatctggtgaccagtggcgcggtcaccagtatagtgcacaggacgtgaatggctccgaggctggcggagtcactcactataagtgtgagagacgatgtcctgtgccaagtatacgtccaaccctaacgggttaagtgaaattagttgctcataacagggacggtgtacctgtttgctcgtggctggctatcgaatggacgggaccaatacacccccctgttagtaatggggtaagagagagcggtctgaaactatggccgaaatcacgacgccccactcctacccataacctgcacgtggtaccgccgcacattgaccgatacgggaggaggggcagcacttgaatcacgtagtcttggtgtagccattgcgggactacagccctcgtaagtgccgccttagaacgcaacggggcaataggtgggccggggcgctagcgggggggagtaatctcccctgttggcgtgcaccgcactgctcccactgggggcagtgtcatccggaaacaggtgggccggggcgccaccaggggggagcaatccctcctgatgatggcgagcaccgcactgtcccttatgggacggtgtaacccggatggctgtacacgtggtaaacacgtgacagcagccccgatggacggaccgcgaggaccgtcaagcctagcaggtaccttcgggtggggccttgcgatacctgcgggcgaaccctgtggtcgggtttgcagcccggccacagtgggtttttttcctgttgcaaaaaagtcaaataaagaaaatagacctgaagcctctggcctcccgctggagtcagagaggacaggcgataacccgactgtgcggggttccgccggcgcagatcctgtgggtcaggatgcgcctggttggacctgccagttctgcgaacgaaccttttcgaccaacaggggtttgggtgtccacaagcgtagagcccaccctgttgagaccaatacggatgccgctccgatgatggtgaagcggcggtggcatggcgaggaaatcgacctcctcgctcgcaccgaggccaggttgctcgctgagcggggtcagtgctcgggtggagacctctttggcgcgcttccagggtttggaagaactctggaagcgattaagggacaacggcggagggagccttatcgggcattggtgcaagcgcaccttgcccgatttggttcccagccgggtccctcgtcgggggggtgctcggccgagcctgacttccggcgggcttctggagctgaggaagcggtcgaggaacgatgcgccgaagacgccgctgcctatgatccatccgcagtcggtcagatgtcgcccgatgccgctcgggttctctccgaactccttgagggtgcggggagaagacgagcgtgcagggctatgagacccaagactgcagggcggcgaaacgatttgcacgatgatcggacagctagtgcccacaaaaccagtagacaaaagcgcagggcagagtacgcgcgtgtgcaggaactgtacaagaagtgtcgcagcagagcagcagctgaggtgatcgatggcgcgtgtgggggtgtcggacactcgctcgaggagatggagacctattggcgacctatcctcgagagagtgtccgatgcacctgggcctacaccggaagctcttcacgccctagggcgtgcggagtggcacgggggcaatcgcgactacacccagctgtggaagccgatctcggtggaagagatcaaggcctcccgctttgactggcgaacttcgccgggcccggacggtatacgttcgggtcagtggcgtgcggttcctgtgcacttgaaggcggaaatgttcaatgcatggatggcacgaggcgaaatacccgaaattctacggcagtgccgaaccgtctttgtacctaaggtggagagaccaggtggaccgggggaatatcgaccgatcttgatcgcgtcgattcccctgagacactttcactccatcttggcccggaggctgttggcttgctgcccccctgatgcacgacagcgcggatttatctgcgccgacggtacgctggagaattccgcagtactggacgcggtgcttggggatagcaggaagaagctgcgggaatgtcacgtggcggtgctagacttcgccaaggcatttgacacagtgtctcacgaggcacttgtcgaattgctgaggttgaggggcatgcccgaacagttctgcggctacattgctcacttatacgatacggcgtccaccaccttagccgtgaacaatgaaatgagcagccctgtgaaagtgggacgaggggttcgtcaaggggaccctctgtcgccgatactcttcaacgtggtgatggacctcatcctagcttccctgccggagagggtcgggtataggttggagatggaacttgtgtccgctctggcctatgctgacgacctagtcctgcttgcggggtcgaaggtagggatgcaggagtccatctctgctgtggactgtgttggtaagcagatgggcctacgcctgaattgcaggaagagcgcggttctgtctatgataccggatggccaccgcaagaagcatcactacctgactgagcgaaccttcaatattggaggtaagccgctcaggcaggtgagttgtgttgagcggtggcgatatcttggtgtcgattttgaggcctctggatgcgtgacattagagcatagtatcagtagtgctctgaataacatctcaagggcacctctcaaaccccaacagaggttggagattttgagagctcatctgattccgagattccagcacggttttgtgcttggaaacatctcggatgaccgattgagaatgctcgatgtccaaatccggaaagcagtcggacagtggctaaggctaccggcggatgtgcccaaggcatactatcacgccgcagttcaggacggcggcttagcgatcccatcggtgcgagcgaccatcccggacctcattgtgaggcgtttcggggggctcgactcgtcaccatggtcagtggcaagagccgccgccaaatctgataagattcgtaagaaactgcggtgggcctggaaacagctccgcaggttcagccgtgttgactccacaacgcaacgaccatctgtgcgcttgttttggcgagaacatctgcacgcatctgttgatggacgcgaacttcgcgaatccacacgcaccccgacatccacaaagtggattagggagcgatgcgcgcagataaccggacgggacttcgtgcagttcgtgcacactcatatcaacgccctcccatcccgcattcgcggatcgagagggcgtagaggtgggggtgagtcttcgttgacctgccgtgctggttgcaaggttagggagacgacggctcacatcctacaacagtgtcacagaacacacggcggccggattctacgacacaacaagattgtatctttcgtggcgaaagccatggaagagaacaagtggacggttgagctggagccgaggctacgaacatcggttggtctccgtaagccggatattatcgcctccagggatggtgtcggagtgatcgtggacgtgcaggtggtctcgggccagcgatcgcttgacgagcttcaccgtgagaaacgtaataaatacgggaatcacggggagctggttgagttggtcgcaggtagactaggacttccgaaagctgagtgcgtgcgagccacttcgtgcacgatatcttggaggggagtatggagcctgacttcttataaggagttaaggtccataatcgggcttcgggaaccgacactacaaatcgttccgatactggcgttgagaggttcacacatgaactggaccaggttcaatcagatgacgtccgtcatggggggcggcgttggttgagccttgcacagtagtccagcggtaagggtgtagatcaggcccgtctgtttcttccccggagctcgctcccttggcttcccttatatttaacatcagaaacagacattaaacatctactgatccaatttcgccggcgtacggccacgatcgggagggtgggaatctcggggatcttccgatcctaatccatgatgattacgacctgagtcactaaagacgatggcatgatgatccggcgatgaaaa

SEQ ID NO: 1545 - DNA, 4327 bp, Hydra vulgaris
  source 1..4327: mol_type = unassigned DNA
ttcaagtggatgaagctgggaaggtaatctgtagttggttgagttggttgcagattactgctgtcgattttgctttctattgaaagcctgtctctacgggtcctgaagcttgaattttggtagctatagttttgtgggaggaaagtggaattttgtaccatcttttgtctctcgtatctactatagtaaatccggtcatgcagcctctacgcggcgcaactagaaacttggatcagtgatcaaggctaatgcatgccgggtctcctcagattaggagtataatacaaatctgacttcatcactaagaggctatggggctaacgatcctatagtctcgatgaacctattgattgttactagtagcataaaagaaagtgacgtaccctctagtggaaaggggggtgtagcagtcaataacataacagcaggagctagtggaaaagatacgtgcgtgatcatacacccaggtaccgatggtatttggtgctgtactgagtgtgtagagatacataacagcggtaaggatctgaaacgacatcttgcaaaacgtcacccgagtgtaacgataagcggttacaaatgcaatctgtgtccatttgttagtgaacgccaactaagtgtggggacacatctgaggtactgcagaggcgtaaaagaagtggttaaaagagagtttgcatgcgcgagctgctctttttcttcggatacgttctcaggacttcaggtgcatatgcaaagaaagcatatagcagaatggaacgaccagctgaaggagaaaacggagtttgcttggacagaccgagaattgagggagcttgctgagaaggaacttaccactccttccttcaggtacaacaaaattttctatgctgcgctaggtacctcccggacctacgacgctgtgaggaaaattcgctataatgacagatacaaatctgccattgctgaaatgcgatcacagatagcagatgcggctgccgctgcacaagagagggatgtagagcggggtttagtttcagcacactcagacagaggaaaagaaatgctccctgttgttgaaaccaaaagtgatatccaagtaaacaacgatatcaaaaaggatattgaattaacaccgaattcaagacagaaacaaactaatctagcgctggcaaggccagctgtaattgaggtggaggaagacttgggtaggcaggatgtgaaacaatatctcgcatccctgcgccaagacgactacacaagtccggccgagcggtcaatctttgcatactgcagggaggaaaccaattggtctgcgacaaaaagacaggtattaaagatatcgagaactaccagaggtttaagacaacctaagaaggttcgtccatttgagtttccggaagggttcaaacctaacagaaatatgagaaagtggagaaagtatagattccttcaggaatgctatagggaaaagagagctgagactgttagcaagatcctggacgggacttttatcgatgaaccggaggaagagattagaccagagttagaggaagtacaacgtatgtacattgaccggctggagaaaagaactcagctggataccacgaagattgtgcaaacagacgaggtgttttgtctgcaaagctacggtcgcattacgatcggggaagtaagagatgcactcggtgcaagcaagaaggactcggcctcgggtcctgacggcctgcttctacaggatgtgaggaggctgggaccactattattgtgtaacatctttaacatgtggtacttacatgggatccctgtggaagaaaacaggtgtcgaacaatactcttatacaagagtggcgatagacatctggcatcaaactatagacctgtgacaatcggcaacatgctgaacaggctttacgccaaaatctgggacaaacggatccggaagaacgtgcgtcttcatgtgaggcaaaaagcatttatcccggtggatgggtgctttgagaacgtaaaaacgatccaatgcgttctccagtcttacagaaagcgtaagttggaacacaacgtcgtatttattgatcttgccaaggcctttgacacggtcttgcatgactcgataaggaaagcgttgtggcggaaaggtgttccgtctggggttgttaaagtggtagacagcttatatgcgggagctgtcacaagcataagtgttggaaaaacgaaaactcgttctatatgtataaactctggagtcaagcagggttgtcctctgtcacctcttctattcaacctaatactggatgaactagcggagaggatagaggcaaccggctgcgggttagatcttgatggtcacgttctatcatctatggcctttgctgacgactacgtgttgctagcgaaggactccgtggagatgaacgagttgataagagtgtgtagtacattcttcaaagagaaaggcttatctgtaaacccaggtaaatgtcaatcgctaagagttcttcccgtaaaggagaagaaacggtcaatgaaggtccttgttagacctcatagatggtggaggataaaagaccaggatgttgacatcccatctatgacatatgacagcttaggaaaataccttggtgtttcgattgacccaactggtaagatagcgcttccgattgaggagtggaagaattggatgaccaagctaaaagagtgtaagctcaagcccgagcagaaagttaaaattctgaaagaagtggtttgctctcgggtaaactacgttttgcggatgtcagagtgtggcatcagcgaacttcggagttggacacgatttgtaaggaattgggcgaaaaacatcattcacttacccacatggtgcagtagtgactggatacactcgatcaaagggttaggcattcccgacgtttcgaagggaattgtcatacaacgtatgagggcttcggagaaaatgtctacgtctgaagacggtatagtccgcgtggttggtgcacgacttgttcagaagaacagagtcttgtgggaaaaggccggtttcgaaggtatcgaactgaaggcagccaggaggcactgcgaagtggagagactcaacaacattggtaacattaccaacggcgttgcactcaaaactatcgcagcagtctcctcggtaaatcggtactggatgattgaagacaacttgaaatccgggaacaagattctcgtttggaaagcaatggcgggtgccattccaacaaagattaacctttcgcggggcgtagcagaccagaccctcaaaaaatgtcgtcgatgcggtttaacagcggaaacggatggacacatcttggctggatgccatactagcagcgacgcgtactcaaaacgtcacaacatgctctgtgataaactcgccaaagagctcaaactcaatggtggaccaaacagacgtgtgtggcgcgagaggacgtgcttcactagtacaggcaggcgatatagacctgacattatcgttaaagatgacagtaaaatcacagtcatcgatatgacttgtccgtatgagaaatcagaaggacacctgatccaatgtgaaagtgcgaaagtaactaaatacgagccactcaagctagataagtattggactcgagaactcgagggagcaaatggtattgttgctgaaaaggtagagctgatgggattggcaataggggcgatcggcacaatcatgcgtagtacccttcggaaactctgtgagttaaagtcgggcaggatcgtaagacgtctacaaatgattgcttgtaataatagcgcccaaattataaagggtcacctgtcaagggcgactcggaggaatttgcggtgataaatgccaaaagttgcttgggctaaatgatacgtacgctagaaaaagcgacttgctgcacggatgacggttcatcagagcccgatatgtgcatgtcaaggcggcagggagaatcactagtgtagctgttctttccattacgacttacgcggttaacgtggcacgatagatttacaccaggaaataatacgtgaagggttccaccatatactggagtttagatctatgagggaaacatttgtaataagtcagtctggtaacctggcgccgctgttgagtcaaattaactatgtcaatactcattaagttatcgactttgatatggcatggggtgattccgcgttatatcaaagtcaaacatgatgattgcaatgagaaactaccacgcttggtcacgtttgtgaggagaacatctcattcaagcctcccggatgtcggcacccgctgacatcttctggcttatgaaaattttcattaatttttgtaagtcatgggcggcttgaaagc

SEQ ID NO: 1546 - DNA, 4265 bp, Hydra vulgaris
  source 1..4265: mol_type = unassigned DNA
cttggggtcactgacacatttttcggtagccatagttttttgagaggaagagtggaagtttttccatgagtcgtctctcgtataaactgtggtaaatccggccatccagcctctacgcggcgcaactagaaacttggatcagtgatcaaggctaatggatgacgggactccatggataaggagatataaagatcttatttgaacgcatcttaaggggttatggggctaacacccccttaattctggtgcacatttattgaccgttatgagcaatagaatcacgataggtgatgtaccctcggtaggaaaggggggtttaactgtcaataaacaaacagcaggagctgatggtgctgaagcgtgtgtagtcatacacccaggtgccaagggtatttggtcctctcctgcgtgtttaagaaagtttacgatcggaaaagaactaagggcacatttggctcaaattcataaacttgcaccgagtgcagttcggtacaggtgtaataagtgtccgtatgagggtgatgtccaactcagtgtgggaacacatctgaggtactgtaagggtattgcgggagtggtggaggagaaaaagcaattcgcttgcgcgatttgtaatttctcttcggataccttttcaggacttcaggtgcataagcaaagaaagcatgtagttgaatggaacgagcagctgaaagagaaaacggagtttgcttggacagacagggaactgcgggagctggcggttaaggaagtaacgattcctttctctgtggtgaatacggagacctttgctgtgctagatattacgacgcggactaaggatgctgtgaggaaaattcgctacacggatagatacaaatctatcctggctgaagtacgcgcacaagttaacgctgtggcggaggaagcgccgcaagctagtgatgagagtcaaataacgctcttagttaacacaggcaggggagcagaattacaacctgctgtgattaatataactgattcaattgaattagttactgatgtcaatgaggttgaaatggtaacatcgaattcaaccaatgaagaacagcctatcaacgcgccggtggaaccggctgtaattgaggcggacttgggaagacaggatgcgaaactatatctcgcatcgctgcgtcaaagcgattgcacaaacgcatctgatcgatggacccttgcgtattgcaggggagaagttgattggtgtaagacgaaaagcaggcttttcaaagtatcaagacatgcccggggtttaagacaacctcaaagggtggagaattgggagtttccagagggattcagacctaacaggaaccttcgtaaatggaggaagtattcattcttgcaaagttgctatagaacgaagaagaaggaaactgttagtaagattcttgatggtactttcaaggacacacctgaggaagagattaggccagagttggaggaagtacaacgtgtgtacgttgaccggctagaggtaagaactcagctggataccactaggacagtgcatatagacgaaagattcgatttagtaagctatggtcgcattacgatcagggaggtacaagacgcaatcagcgcaagcaagaaggatgcctcagggggtcccgacggcttgctcctacaggacgtgaaaaaggcgagcccacgccaattgtgtatcatctttaatatgtggtacttgcatggaatccctgtagtggaaaataggtgccgaacaatactcttgcataagggtggcgagaagcatctaacgtcgaactaccgacctgtgacgatcggcaatatgctgaatagggtatacgctaagatctgggacagacggatcagaaaaaacctgcaacttcatgtgagacagaaagcattcgtcccgctggatgggtgctttgagaatgtaaaaaccatccaatgcattctccagtcttacagaaggagcaggcgggaacacaatgtcgtatttgtcgatcttgcaaaagcgtttgatacgattttgcatgattcgatagagaaagcattgctgaggaaaggcataccgcgaagtgtgataaaagtggtagacagcttatatgcgggagctgtcacgagcattacggttgggaaaacaaagactcgacctatatgtataaattcaggggtgaagcagggttgtcctctatctcctttgctgttcaatctagtaatagatgaactagcggagaggctggaggcaactggctgcggtcttgatctggaaggtcacgtcatttcttccatggcttttgctgatgactacgtgttgttggcgaaagactcggttgaaatgaacgtgctaatgaacgtgtgcaatacgttctttgaggagaagggtttagctgtaaatccagcaaaatgtcagtcgttacgcgttttgcctgtaaaaggcaaacggtccatgaaagtccttacgaggacgcatagatggtggaaaattaataaccaggatgttgaaatcccatctatgacatacgaaagtgttggaaaatatcttggggtaatgattgacccagctggtaagattgctcttccgattgaggaatggaagctttggctaactaggttaagggagtgtaagctcaaacctgatcaaaaagtgaaggtgctgaaagaggtagtttgtgcccgagcaaactatgttctccggatgtccgggtgcggaatctgtgagctccgtaagtggtcacgatttgtgaggggatgggtgaaatccatcattcacttccccgcatggtgcaatagcgaatggatgcattcgagcaaaggcttaggcattcctgatgtagtgtcaggaattgtcatccaacgaatgagagctgcggaaaaaatggctaagtcaacagacggagtagtccgagttgtcggggcccgcattgtgcagacaaatagagttttgtggaaaagggccggattagcaggcatagaactggatgccgccaggaagttctgtgaggttaagagggtgaacaaaattggcaatcaaaccaatggaggcgccctcaagactatagcagagtcctcggtgagccggcactggttattggaaaagaatataagacctggaaacaaaattctagtttggaaggcaatggcaggagtgattccaacaaagatcaatctgtctagaggcgtagccgaccagactctcaaaaaatgtcggtgttgtggtttaacagcagaaactgattgtcacatcttggccggatgtcctaccagtcgggatgcgtactcgaaacgtcataacttgctttgtgataaactcgccaaagagctaagactcaatggtgggccaagcagacgggtgtggcgcgagaggatgtgtctctctgggaatggcaggcgttataagcccgatattgttgtgaaagatgatggtgtaattactgtcatcgatatggcatgtccgtacgagaaatcggaaagacacctaagtcaatgcgaagatgcaaaagttgctaagtacgagccactaaggcttgataggagttggactcaagaacttgaggggaataacggcagaagtgctaatgaaatatcagttgtagggattgcagtaggggcgattggaacaattacgcgtaaaacccagcggatacttagcaagttgaaactggccaaggtcggaagaccgttacaaataattgcatgtaatgaaagcgcccaaattataagacgacatctttcgggatcgagacttagaaatttgcggtgaatgcccgaggtagttgggataatgatgcacaagctcgtaaggcgacttgctgcacgtatgccgctaaacgcttagctcgatgagtgcatgtcaagacggtcgggagtatgatcagtggagctgactttccagacaactcacgcggattcgcgtgcggtggatacaacacctggtataacatatgaagggttccatctagtacagggataacgatccatgggagcaaactaattagttggaggtaatccaacgccgctgttgagtcagtttttaaccgccagtcaactcttgtaggttatcggtcttcggcagaccttggaccgcctagcgccggccaacagtttgtcgtcgactaacatgatgatttgcgagagaaacccacgctttgtcacttatgtgaggataaaatctcttgtccatatgatcctttgaagggaacagcgctttgagcttgctcggcgttggcacctttagtctgtaatattttcttgatattatggacgaaaaaggtagtatggttgca

SEQ ID NO: 1547 - protein, 4 aa, unidentified
  source 1..4: note = Description of Unknown: RT domain motif sequence
YADD

SEQ ID NO: 1548 - protein, 4 aa, unidentified
  source 1..4: note = Description of Unknown: RT domain motif sequence
YMDD

SEQ ID NO: 1549 - protein, 4 aa, synthetic construct
  source 1..4: note = Description of Artificial Sequence: Synthetic peptide
YVDD

SEQ ID NO: 1550 - protein, 427 aa, unidentified
  source 1..427: note = Description of Unknown: [Eubacterium] rectale M104/1 seqeunce
MDTSNLMEQILSSDNLNRAYLQVVRNKGAEGVDGMKYTELKEHLAKNGETIKGQLRTRKYKPQPARRVEIPKPDGGVRNLGVPTVTDRFIQQAIAQVLTPIYEEQFHDHSYGFRPNRCAQQAILTALNIMNDGNDWIVDIDLEKFFDTVNHDKLMTLIGRTIKDGDVISIVRKYLVSGIMIDDEYEDSIVGTPQGGNLSPLLANIMLNELDKEMEKRGLNFVRYADDCIIMVGSEMSANRVMRNISRFIEEKLGLKVNMTKSKVDRPSGLKYLGFGFYFDPRAHQFKAKPHAKSVAKFKKRMKELTCRSWGVSNSYKVEKLNQLIRGWINYFKIGSMKTLCKELDSRIRYRLRMCIWKQWKTPQNQEKNLVKLGIDRNTARRVAYTGKRIAYVCNKGAVNVAISNKRLASFGLISMLDYYIEKCVTC

SEQ ID NO: 1551 - protein, 420 aa, Geobacillus stearothermophilus
MALLERILADRNLITALKRVEANQGAPGIGDVSTDQLRDIYRAHWSTIRAQLLAGTYRPAPVRRVGIPKGPGGTRQLGITPVVDRLIQQIALQELTPIFDPDFSPSSFGFRPGRNAHDAVRQAQGYIQEYGRYVVDMDLKEFFDRVNHDLIMSRVARKVDKKRVLKLIRYALQAGVMIEGVKVQTEEGTQPGGPLSPLLANILLDDLDKELEKRGLKFCYRADDCNIYVSKLRAGQRVKQSIQRFLEKTLKLKVNEEKSVADRPWKRAFGLFSFTPERKARIRLAPRSIQRLKQRIRQLTNPNWSISMPREIHRVNQYVGMWIGYFRLVTEPSVLQTIEGWIRRRLRLCWQLQWKRVRTRIRELRALGLKETAVMEIANRTKGAWRTTKPQTLHQALGKYTWTAQGLKTSLQRYFELRQG

SEQ ID NO: 1552 - protein, 599 aa, Lactococcus lactis
MKPTMAILERISKNSQENIDEVFTRLYRYLLRPDIYYVAYQNLYSNKGASTKGILDDTADGFSEEKIKKIIQSLKDGTYYPQPVRRMYIAKKNSKKMRPLGIPTFTDKLIQEAVRIILESIYEPVFEDVSHGFRPQRSCHTALKTIKREFGGARWFVEGDIKGCFDNIDHVTLIGLINLKIKDMKMSQLIYKFLKAGYLENWQYHKTYSGTPQGGILSPLLANIYLHELDKFVLQLKMKFDRESPERITPEYRELHNEIKRISHRLKKLEGEEKAKVLLEYQEKRKRLPTLPCTSQTNKVLKYVRYADDFIISVKGSKEDCQWIKEQLKLFIHNKLKMELSEEKTLITHSSQPARFLGYDIRVRRSGTIKRSGKVKKRTLNGSVELLIPLQDKIRQFIFDKKIAIQKKDSSWFPVHRKYLIRSTDLEIITIYNSELRGICNYYGLASNFNQLNYFAYLMEYSCLKTIASKHKGTLSKTISMFKDGSGSWGIPYEIKQGKQRRYFANFSECKSPYQFTDEISQAPVLYGYARNTLENRLKAKCCELCGTSDENTSYEIHHVNKVKNLKGKEKWEMAMIAKQRKTLVVCFHCHRHVIHKHK

SEQ ID NO: 1553 - protein, 1114 aa, Bombyx mori
MMASTALSLMGRCNPDGCTRGKHVTAAPMDGPRGPSSLAGTFGWGLAIPAGEPCGRVCSPATVGFFPVAKKSNKENRPEASGLPLESERTGDNPTVRGSAGADPVGQDAPGWTCQFCERTFSTNRGLGVHKRRAHPVETNTDAAPMMVKRRWHGEEIDLLARTEARLLAERGQCSGGDLFGALPGFGRTLEAIKGQRRREPYRALVQAHLARFGSQPGPSSGGCSAEPDFRRASGAEEAGEERCAEDAAAYDPSAVGQMSPDAARVLSELLEGAGRRRACRAMRPKTAGRRNDLHDDRTASAHKTSRQKRRAEYARVQELYKKCRSRAAAEVIDGACGGVGHSLEEMETYWRPILERVSDAPGPTPEALHALGRAEWHGGNRDYTQLWKPISVEEIKASRFDWRTSPGPDGIRSGQWRAVPVHLKAEMFNAWMARGEIPEILRQCRTVFVPKVERPGGPGEYRPISIASIPLRHFHSILARRLLACCPPDARQRGFICADGTLENSAVLDAVLGDSRKKLRECHVAVLDFAKAFDTVSHEALVELLRLRGMPEQFCGYIAHLYDTASTTLAVNNEMSSPVKVGRGVRQGDPLSPILFNVVMDLILASLPERVGYRLEMELVSALAYADDLVLLAGSKVGMQESISAVDCVGRQMGLRLNCRKSAVLSMIPDGHRKKHHYLTERTFNIGGKPLRQVSCVERWRYLGVDFEASGCVTLEHSISSALNNISRAPLKPQQRLEILRAHLIPRFQHGFVLGNISDDRLRMLDVQIRKAVGQWLRLPADVPKAYYHAAVQDGGLAIPSVRATIPDLIVRRFGGLDSSPWSVARAAAKSDKIRKKLRWAWKQLRRFSRVDSTTQRPSVRLFWREHLHASVDGRELRESTRTPTSTKWIRERCAQITGRDFVQFVHTHINALPSRIRGSRGRRGGGESSLTCRAGCKVRETTAHILQQCHRTHGGRILRHNKIVSFVAKAMEENKWTVELEPRLRTSVGLRKPDIIASRDGVGVIVDVQVVSGQRSLDELHREKRNKYGNHGELVELVAGRLGLPKAECVRATSCTISWRGVWSLTSYKELRSIIGLREPTLQIVPILALRGSHMNWTRFNQMTSVMGGGVG

SEQ ID NO: 1554 - protein, 1275 aa, Homo sapiens
MTGSNSHITILTLNVNGLNSPIKRHRLASWIKSQDPSVCCIQETHLTCRDTHRLKIKGWRKIYQANGKQKKAGVAILVSDKTDFKPTKIKRDKEGHYIMVKGSIQQEELTILNIYAPNTGAPRFIKQVLSDLQRDLDSHTLIMGDFNTPLSILDRSTRQKVNKDTQELNSALHQTDLIDIYRTLHPKSTEYTFFSAPHHTYSKIDHIVGSKALLSKCKRTEIITNYLSDHSAIKLELRIKNLTQSRSTTWKLNNLLLNDYWVHNEMKAEIKMFFETNENKDTTYQNLWDAFKAVCRGKFIALNAYKRKQERSKIDTLTSQLKELEKQEQTHSKASRRQEITKIRAELKEIETQKTLQKINESRSWFFERINKIDRPLARLIKKKREKNQIDTIKNDKGDITTDPTEIQTTIREYYKHLYANKLENLEEMDTFLDTYTLPRLNQEEVESLNRPITGSEIVAIINSLPTKKSPGPDGFTAEFYQRYKEELVPFLLKLFQSIEKEGILPNSFYEASIILIPKPGRDTTKKENFRPISLMNIDAKILNKILANRIQQHIKKLIHHDQVGFIPGMQGWFNIRKSINVIQHINRAKDKNHVIISIDAEKAFDKIQQPFMLKTLNKLGIDGMYLKIIRAIYDKPTANIILNGQKLEAFPLKTGTRQGCPLSPLLFNIVLEVLARAIRQEKEIKGIQLGKEEVKLSLFADDMIVYLENPIVSAQNLLKLISNFSKVSGYKINVQKSQAFLYNNNRQTESQIMGELPFTIASKRIKYLGIQLTRDVKDLFKENYKPLLKEIKEDTNKWKNIPCSWVGRINIVKMAILPKVIYRFNAIPIKLPMTFFTELEKTTLKFIWNQKRARIAKSILSQKNKAGGITLPDFKLYYKATVTKTAWYWYQNRDIDQWNRTEPSEIMPHIYNYLIFDKPEKNKQWGKDSLLNKWCWENWLAICRKLKLDPFLTPYTKINSRWIKDLNVKPKTIKTLEENLGITIQDIGVGKDFMSKTPKAMATKDKIDKWDLIKLKSFCTAKETTIRVNRQPTTWEKIFATYSSDKGLISRIYNELKQIYKKKTNNPIKKWAKDMNRHFSKEDIYAAKKHMKKCSSSLAIREMQIKTTMRYHLTPVRMAIIKKSGNNRCWRGCGEIGTLVHCWWDCKLVQPLWKSVWRFLRDLELEIPFDPAIPLLGIYPKDYKSCCYKDTCTRMFIAALFTIAKTWNQPNCPTMIDWIKKMWHIYTMEYYAAIKNDEFISFVGTWMKLETIILSKLSQEQKTKHRIFSLIGGN

SEQ ID NO: 1555 - protein, 857 aa, Drosophila virilis
MERSPEPSININGRHAVCTATNMSYAKIKTKYKDSKRTINKFQLTLVKLTKLKSSLKFLLKCRKSNLIPNFIKNLTQHLTILTTDNKTHPDITRTLTRHTHFYHTKILNLLIKHKHNLLQEQTKHMQKAKTNIEQLMTTDDAKAFFESERNIENKITTTLKKRQETKHDKLRDQRNLALADNNTQREWFVNKTKIEFPPNVVALLAKGPKFALPISKRDFPLLKYIADGEELVQTIKEKETQESARTKFSLLVKEHKTKNNQNSRDRAILDTVEQTRKLLKENINIKILSSDKGNKTVAMDEDEYKNKMTNILDDLCAYRTLRLDPTSRLQTKNNTFVAQLFKMGLISKDERNKMTTTTAVPPRIYGLPKIHKEGTPLRPICSSIGSPSYGLCKYIIQILKNLTMDSRYNIKNAVDFKDRVNNSQIREEETLVSFDVVSLFPSIPIELALDTIRQKWTKLEEHTNIPKQLFMDIVRFCIEENRYFKYEDKIYTQLKGMPMGSPASPVIADILMEELLDKITDKLKIKPRLLTKYVDDLFAITNKIDVENILKELNSFHKQIKFTMELEKDGKLPFLDSIVSRMDNTLKIKWYRKPIASGRILNFNSNHPKSMIINTALGCMNRMMKISDTIYHKEIEHEIKELLTKNDFPPNIIKTLLKRRQIERKKPTEPAKIYKSLIYVPRLSERLTNSDCYNKQDIKVAHKPTNTLQKFFNKIKSKIPMIEKSNVVYQIPCGGDNNNKCNSVYIGTTKSKLKTRISQHKSDFKLRHQNNIQKTALMTHCIRSNHTPNFDETTILQQEQHYNKRHTLEMLHIINTPTYKRLNYKTDTENCAHLYRHLLNSQTTSVTISTSKSADV

SEQ ID NO: 1556 - protein, 671 aa, synthetic construct
  source 1..671: note = Description of Artificial Sequence: Synthetic polypeptide
TLNIEDEHRLHETSKEPDVSLGSTWLSDFPQAWAETGGMGLAVRQAPLIIPLKATSTPVSIKQYPMSQEARLGIKPHIQRLLDQGILVPCQSPWNTPLLPVKKPGTNDYRPVQDLREVNKRVEDIHPTVPNPYNLLSGLPPSHQWYTVLDLKDAFFCLRLHPTSQPLFAFEWRDPEMGISGQLTWTRLPQGFKNSPTLFDEALHRDLADFRIQHPDLILLQYVDDLLLAATSELDCQQGTRALLQTLGNLGYRASAKKAQICQKQVKYLGYLLKEGQRWLTEARKETVMGQPTPKTPRQLREFLGTAGFCRLWIPGFAEMAAPLYPLTKTGTLFNWGPDQQKAYQEIKQALLTAPALGLPDLTKPFELFVDEKQGYAKGVLTQKLGPWRRPVAYLSKKLDPVAAGWPPCLRMVAAIAVLTKDAGKLTMGQPLVILAPHAVEALVKQPPDRWLSNARMTHYQALLLDTDRVQFGPVVALNPATLLPLPEEGLQHNCLDILAEAHGTRPDLTDQPLPDADHTWYTDGSSLLQEGQRKAGAAVTTETEVIWAKALPAGTSAQRAELIALTQALKMAEGKKLNVYTDSRYAFATAHIHGEIYRRRGLLTSEGKEIKNKDEILALLKALFLPKRLSIIHCPGHQKGHSAEARGNRMADQAARKAAITETPDTSTLL

SEQ ID NO: 1557 - protein, 859 aa, Rous sarcoma virus
TVALHLAIPLKWKPDHTPVWIDQWPLPEGKLVALTQLVEKELQLGHIEPSLSCWNTPVFVIRKASGSYRLLHDLRAVNAKLVPFGAVQQGAPVLSALPRGWPLMVLDLKDCFFSIPLAEQDREAFAFTLPSVNNQAPARRFQWKVLPQGMTCSPTICQLVVGQVLEPLRLKHPSLCMLHYMDDLLLAASSHDGLEAAGEEVISTLERAGFTISPDKVQREPGVQYLGYKLGSTYVAPVGLVAEPRIATLWDVQKLVGSLQWLRPALGIPPRLMGPFYEQLRGSDPNEAREWNLDMKMAWREIVRLSTTAALERWDPALPLEGAVARCEQGAIGVLGQGLSTHPRPCLWLFSTQPTKAFTAWLEVLTLLITKLRASAVRTFGKEVDILLLPACFREDLPLPEGILLALKGFAGKIRSSDTPSIFDIARPLHVSLKVRVTDHPVPGPTVFTDASSSTHKGVVVWREGPRWEIKEIADLGASVQQLEARAVAMALLLWPTTPTNVVTDSAFVAKMLLKMGQEGVPSTAAAFILEDALSQRSAMAAVLHVRSHSEVPGFFTEGNDVADSQATFQAYPLREAKDLHTALHIGPRALSKACNISMQQAREVVQTCPHCNSAPALEAGVNPRGLGPLQIWQTDFTLEPRMAPRSWLAVTVDTASSAIVVTQHGRVTSVAVQHHWATAIAVLGRPKAIKTDNGSCFTSKSTREWLARWGIAHTTGIPGNSQGQAMVERANRLLKDRIRVLAEGDGFMKRIPTSKQGELLAKAMYALNHFERGENTKTPIQKHWRPTVLTEGPPVKIRIETGEWEKGWNVLVWGRGYAAVKNRDTDKVIWVPSRKVKPDITQKDEVTKKDEASPLFAG

SEQ ID NO: 1558 - protein, 572 aa, Avian myeloblastosis virus
TVALHLAIPLKWKPNHTPVWIDQWPLPEGKLVALTQLVEKELQLGHIEPSLSCWNTPVFVIRKASGSYRLLHDLRAVNAKLVPFGAVQQGAPVLSALPRGWPLMVLDLKDCFFSIPLAEQDREAFAFTLPSVNNQAPARRFQWKVLPQGMTCSPTICQLIVGQILEPLRLKHPSLRMLHYMDDLLLAASSHDGLEAAGEEVISTLERAGFTISPDKVQREPGVQYLGYKLGSTYVAPVGLVAEPRIATLWDVQKLVGSLQWLRPALGIPPRLMGPFYEQLRGSDPNEAREWNLDMKMAWREIVQLSTTAALERWDPALPLEGAVARCEQGAIGVLGQGLSTHPRPCLWLFSTQPTKAFTAWLEVLTLLITKLRASAVRTFGKEVDILLLPACFREDLPLPEGILLALRGFAGKIRSSDTPSIFDIARPLHVSLKVRVTDHPVPGPTVFTDASSSTHKGVVVWREGPRWEIKEIADLGASVQQLEARAVAMALLLWPTTPTNVVTDSAFVAKMLLKMGQEGVPSTAAAFILEDALSQRSAMAAVLHVRSHSEVPGFFTEGNDVADSQATFQAY

SEQ ID NO: 1559 - protein, 560 aa, Human immunodeficiency virus 1
PISPIETVPVKLKPGMDGPKVKQWPLTEEKIKALVEICTEMEKEGKISKIGPENPYNTPVFAIKKKDSTKWRKLVDFRELNKRTQDFWEVQLGIPHPAGLKKKKSVTVLDVGDAYFSVPLDEDFRKYTAFTIPSINNETPGIRYQYNVLPQGWKGSPAIFQSSMTKILEPFRKQNPDIVIYQYMDDLYVGSDLEIGQHRTKIEELRQHLLRWGLTTPDKKHQKEPPFLWMGYELHPDKWTVQPIVLPEKDSWTVNDIQKLVGKLNWASQIYPGIKVRQLCKLLRGTKALTEVIPLTEEAELELAENREILKEPVHGVYYDPSKDLIAEIQKQGQGQWTYQIYQEPFKNLKTGKYARMRGAHTNDVKQLTEAVQKITTESIVIWGKTPKFKLPIQKETWETWWTEYWQATWIPEWEFVNTPPLVKLWYQLEKEPIVGAETFYVDGAANRETKLGKAGYVTNRGRQKVVTLTDTTNQKTELQAIYLALQDSGLEVNIVTDSQYALGIIQAQPDQSESELVNQIIEQLIKKEKVYLAWVPAHKGIGGNEQVDKLVSAGIRKVL

SEQ ID NO: 1560 - protein, 538 aa, Saccharomyces cerevisiae
AVKAVKSIKPIRTTLRYDEAITYNKDIKEKEKYIEAYHKEVNQLLKMKTWDTDEYYDRKEIDPKRVINSMFIFNKKRDGTHKARFVARGDIQHPDTYDSGMQSNTVHHYALMTSLSLALDNNYYITQLDISSAYLYADIKEELYIRPPPHLGMNDKLIRLKKSLYGLKQSGANWYETIKSYLIQQCGMEEVRGWSCVFKNSQVTICLFVDDMVLFSKNLNSNKRIIEKLKMQYDTKIINLGESDEEIQYDILGLEIKYQRGKYMKLGMENSLTEKIPKLNVPLNPKGRKLSAPGQPGLYIDQDELEIDEDEYKEKVHEMQKLIGLASYVGYKFRFDLLYYINTLAQHILFPSRQVLDMTYELIQFMWDTRDKQLIWHKNKPTEPDNKLVAISDASYGNQPYYKSQIGNIYLLNGKVIGGKSTKASLTCTSTTEAEIHAISESVPLLNNLSYLIQELNKKPIIKGLLTDSRSTISIIKSTNEEKFRNRFFGTKAMRLRDEVSGNNLYVYYIETKKNIADVMTKPLPIKTFKLLTNKWIH

SEQ ID NO: 1561 - protein, 328 aa, Bordetella virus BPP1
MGKRHRNLIDQITTWENLLDAYRKTSHGKRRTWGYLEFKEYDLANLLALQAELKAGNYERGPYREFLVYEPKPRLISALEFKDRLVQHALCNIVAPIFEAGLLPYTYACRPDKGTHAGVCHVQAELRRTRATHFLKSDFSKFFPSIDRAALYAMIDKKIHCAATRRLLRVVLPDEGVGIPIGSLTSQLFANVYGGAVDRLLHDELKQRHWARYMDDIVVLGDDPEELRAVFYRLRDFASERLGLKISHWQVAPVSRGINFLGYRIWPTHKLLRKSSVKRAKRKVANFIKHGEDESLQRFLASWSGHAQWADTHNLFTWMEEQYGIACH

SEQ ID NO: 1562 - protein, 320 aa, Escherichia coli
MKSAEYLNTFRLRNLGLPVMNNLHDMSKATRISVETLRLLIYTADFRYRIYTVEKKGPEKRMRTIYQPSRELKALQGWVLRNILDKLSSSPFSIGFEKHQSILNNATPHIGANFILNIDLEDFFPSLTANKVFGVFHSLGYNRLISSVLTKICCYKNLLPQGAPSSPKLANLICSKLDYRIQGYAGSRGLIYTRYADDLTLSAQSMKKVVKARDFLFSIIPSEGLVINSKKTCISGPRSQRKVTGLVISQEKVGIGREKYKEIRAKIHHIFCGKSSEIEHVRGWLSFILSVDSKSHRRLITYISKLEKKYGKNPLNKAKT

SEQ ID NO: 1563 - protein, 1132 aa, Homo sapiens
MPRAPRCRAVRSLLRSHYREVLPLATFVRRLGPQGWRLVQRGDPAAFRALVAQCLVCVPWDARPPPAAPSFRQVSCLKELVARVLQRLCERGAKNVLAFGFALLDGARGGPPEAFTTSVRSYLPNTVTDALRGSGAWGLLLRRVGDDVLVHLLARCALFVLVAPSCAYQVCGPPLYQLGAATQARPPPHASGPRRRLGCERAWNHSVREAGVPLGLPAPGARRRGGSASRSLPLPKRPRRGAAPEPERTPVGQGSWAHPGRTRGPSDRGFCVVSPARPAEEATSLEGALSGTRHSHPSVGRQHHAGPPSTSRPPRPWDTPCPPVYAETKHFLYSSGDKEQLRPSFLLSSLRPSLTGARRLVETIFLGSRPWMPGTPRRLPRLPQRYWQMRPLFLELLGNHAQCPYGVLLKTHCPLRAAVTPAAGVCAREKPQGSVAAPEEEDTDPRRLVQLLRQHSSPWQVYGFVRACLRRLVPPGLWGSRHNERRFLRNTKKFISLGKHAKLSLQELTWKMSVRDCAWLRRSPGVGCVPAAEHRLREEILAKFLHWLMSVYVVELLRSFFYVTETTFQKNRLFFYRKSVWSKLQSIGIRQHLKRVQLRELSEAEVRQHREARPALLTSRLRFIPKPDGLRPIVNMDYVVGARTFRREKRAERLTSRVKALFSVLNYERARRPGLLGASVLGLDDIHRAWRTFVLRVRAQDPPPELYFVKVDVTGAYDTIPQDRLTEVIASIIKPQNTYCVRRYAVVQKAAHGHVRKAFKSHVSTLTDLQPYMRQFVAHLQETSPLRDAVVIEQSSSLNEASSGLFDVFLRFMCHHAVRIRGKSYVQCQGIPQGSILSTLLCSLCYGDMENKLFAGIRRDGLLLRLVDDFLLVTPHLTHAKTFLRTLVRGVPEYGCVVNLRKTVVNFPVEDEALGGTAFVQMPAHGLFPWCGLLLDTRTLEVQSDYSSYARTSIRASLTFNRGFKAGRNMRRKLFGVLRLKCHSLFLDLQVNSLQTVCTNIYKILLLQAYRFHACVLQLPFHQQVWKNPTFFLRVISDTASLCYSILKAKNAGMSLGAKGAAGPLPSEAVQWLCHQAFLLKLTRHRVTYVPLLGSLRTAQTQLSRKLPGTTLTALEAAANPALPSDFKTILD

SEQ ID NO: 1564 - protein, 710 aa, Neurospora crassa
MPNHRLPNCVSYLGENHELSWLHGMFGLLKRSNPQTGGILGWLNTGPNGFVKYMMNLMGHARDKGDAKEYWRLGRSLMKNEAFQVQAFNHVCKHWYLDYKPHKIAKLLKEVREMVEIQPVCIDYKRVYIPKANGKQRPLGVPTVPWRVYLHMWNVLLVWYRIPEQDNQHAYFPKRGVFTAWRALWPKLDSQNIYEFDLKNFFPSVDLAYLKDKLMESGIPQDISEYLTVLNRSLVVLTSEDKIPEPHRDVIFNSDGTPNPNLPKDVQGRILKDPDFVEILRRRGFTDIATNGVPQGASTSCGLATYNVKELFKRYDELIMYADDGILCRQDPSTPDFSVEEAGVVQEPAKSGWIKQNGEFKKSVKFLGLEFIPANIPPLGEGEVKDYPRLRGATRNGSKMELSTELQFLCYLSYKLRIKVLRDLYIQVLGYLPSVPLLRYRSLAEAINELSPKRITIGQFITSSFEEFTAWSPLKRMGFFFSSPAGPTILSSIFNNSTNLQEPSDSRLLYRKGSWVNIRFAAYLYSKLSEEKHGLVPKFLEKLREINFALDKVDVTEIDSKLSRLMKFSVSAAYDEVGTLALKSLFKFRNSERESIKASFKQLRENGKIAEFSEARRLWFEILKLIRLDLFNASSLACDDLLSHLQDRRSIKKWGSSDVLYLKSQRLMRTNKKQLQLDFEKKKNSLKKKLIKRRAKELRDTFKGKENKEA

SEQ ID NO: 1565 - protein, 785 aa, synthetic construct
  source 1..785: note = Description of Artificial Sequence: Synthetic polypeptide
MILDTDYITEDGKPVIRIFKKENGEFKIEYDRTFEPYLYALLKDDSAIEEVKKITAERHGTVVTVKRVEKVQKKFLGRPVEVWKLYFTHPQDVPAIMDKIREHPAVIDIYEYDIPFAIRYLIDKGLVPMEGDEELKLLAFDIETLYHEGEEFAEGPILMISYADEEGARVITWKNVDLPYVDVVSTEREMIKRFLRVVKEKDPDVLITYNGDNFDFAYLKKRCEKLGINFALGRDGSEPKIQRMGDRFAVEVKGRIHFDLYPVIRRTINLPTYTLEAVYEAVFGQPKEKVYAEEITTAWETGENLERVARYSMEDAKVTYELGKEFLPMEAQLSRLIGQSLWDVSRSSTGNLVEWFLLRKAYERNELAPNKPDEKELARRHQSHEGGYIKEPERGLWENIVYLDFRSLYPSIIITHNVSPDTLNREGCKEYDVAPQVGHRFCKDFPGFIPSLLGDLLEERQKIKKRMKATIDPIERKLLDYRQRAIKILANSLYGYYGYARARWYCKECAESVIAWGREYLTMTIKEIEEKYGFKVIYSDTDGFFATIPGADAETVKKKAMEFLKYINAKLPGALELEYEGFYKRGLFVTKKKYAVIDEEGKITTRGLEIVRRDWSEIAKETQARVLEALLKDGDVEKAVRIVKEVTEKLSKYEVPPEKLVIHKQITRDLKDYKATGPHVAVAKRLAARGVKIRPGTVISYIVLKGSGRIVDRAIPFDEFDPTKHKYDAEYYIEKQVLPAVERILRAFGYRKEDLRYQKTRQVGLSARLKPKGTLEGSSHHHHHH

SEQ ID NO: 1566 - protein, 4 aa, unidentified
  source 1..4: note = Description of Unknown: Polymerase family B motif sequence
DTDS

SEQ ID NO: 1567 - protein, 1145 aa, unidentified
  source 1..1145: note = Description of Unknown: Porcine endogenous retrovirus sequence
MGATGQQQYPWTTRRTVDLGVGRVTHSFLVIPECPAPLLGRDLLTKMGAQISFEQGKPEVSANNKPITVLTLQLDDEYRLYSPLVKPDQNIQFWLEQFPQAWAETAGMGLAKQVPPQVIQLKASATPVSVRQYPLSKEAQEGIRPHVQRLIQQGILVPVQSPWNTPLLPVRKPGTNDYRPVQDLREVNKRVQDIHPTVPNPYNLLCALPPQRSWYTVLDLKDAFFCLRLHPTSQPLFAFEWRDPGTGRTGQLTWTRLPQGFKNSPTIFDEALHRDLANFRIQHPQVTLLQYVDDLLLAGATKQDCLEGTKALLLELSDLGYRASAKKAQICRREVTYLGYSLRDGQRWLTEARKKTVVQIPAPTTAKQVREFLGTAGFCRLWIPGFATLAAPLYPLTKEKGEFSWAPEHQKAFDAIKKALLSAPALALPDVTKPFTLYVDERKGVARGVLTQTLGPWRRPVAYLSKKLDPVASGWPVCLKAIAAVAILVKDADKLTLGQNITVIAPHALENIVRQPPDRWMTNARMTHYQSLLLTERVTFAPPAALNPATLLPEETDEPVTHDCHQLLIEETGVRKDLTDIPLTGEVLTWFTDGSSYVVEGKRMAGAAVVDGTRTIWASSLPEGTSAQKAELMALTQALRLAEGKSINIYTDSRYAFATAHVHGAIYKQRGLLTSAGREIKNKEEILSLLEALHLPKRLAIIHCPGHQKAKDPISRGNQMADRVAKQAAQGVNLLPMIETPKAPEPGRQYTLEDWQEIKKIDQFSETPEGTCYTSDGKEILPHKEGLEYVQQIHRLTHLGTKHLQQLVRTSPYHVLRLPGVADSVVKHCVPCQLVNANPSRIPPGKRLRGSHPGAHWEVDFTEVKPAKYGNKYLLVFVDTFSGWVEAYPTKKETSTVVAKKILEEIFPRFGIPKVIGSDNGPAFVAQVSQGLAKILGIDWKLHCAYRPQSSGQVERMNRTIKETLTKLTAETGVNDWIALLPFVLFRVRNTPGQFGLTPYELLYGGPPPLVEIASVHSADVLLSQPLFSRLKALEWVRQRAWRQLREAYSGGGDLQIPHRFQVGDSVYVRRHRAGNLETRWKGPYHVLLTTPTAVKVEGISTWIHASHVKPAPPPDSGWKAEKTENPLKLRLHRVVPYSVNNFSS

SEQ ID NO: 1568 - protein, 1149 aa, Cynomolgus macaque simian foamy virus
MDPLQLLQPLEAEIKGTKLKAHWDSGATITCVPEAFLEDERPIQTMLIKTIHGEKQQDVYYLTFKVQGRKVEAEVLASPYDYILLNPSDVPWLMKKPLQLTVLVPLHEYQERLLQQTALPKEQKELLQKLFLKYDALWQHWENQVGHRRIKPHNIATGTLAPRPQKQYPINPKAKPSIQIVIDDLLKQGVLIQQNSTMNTPVYPVPKPDGKWRMVLDYREVNKTIPLIAAQNQHSAGILSSIYRGKYKTTLDLTNGFWAHPITPESYWLTAFTWQGKQYCWTRLPQGFLNSPALFTADVVDLLKEIPNVQAYVDDIYISHDDPQEHLEQLEKIFSILLNAGYVVSLKKSEIAQREVEFLGFNITKEGRGLTDTFKQKLLNITPPKDLKQLQSILGLLNFARNFIPNYSELVKPLYTIVANANGKFISWTEDNSNQLQHIISVLNQADNLEERNPETRLIIKVNSSPSAGYIRYYNEGSKRPIMYVNYIFSKAEAKFTQTEKLLTTMHKGLIKAMDLAMGQEILVYSPIVSMTKIQRTPLPERKALPVRWITWMTYLEDPRIQFHYDKSLPELQQIPNVTEDVIAKTKHPSEFAMVFYTDGSAIKHPDVNKSHSAGMGIAQVQFIPEYKIVHQWSIPLGDHTAQLAEIAAVEFACKKALKISGPVLIVTDSFYVAESANKELPYWKSNGFLNNKKKPLRHVSKWKSIAECLQLKPDIIIMHEKGHQQPMTTLHTEGNNLADKLATQGSYVVHCNTTPSLDAELDQLLQGHYPPGYPKQYKYTLEENKLIVERPNGIRIVPPKADREKIISTAHNIAHTGRDATFLKVSSKYWWPNLRKDVVKSIRQCKQCLVTNATNLTSPPILRPVKPLKPFDKFYIDYIGPLPPSNGYLHVLVVVDSMTGFVWLYPTKAPSTSATVKALNMLTSIAIPKVLHSDQGAAFTSSTFADWAKEKGIQLEFSTPYHPQSSGKVERKNSDIKRLLTKLLIGRPAKWYDLLPVVQLALNNSYSPSSKYTPHQLLFGVDSNTPFANSDTLDLSREEELSLLQEIRSSLHQPTSPPASSRSWSPSVGQLVQERVARPASLRPRWHKPTAILEVVNPRTVIILDHLGNRRTVSVDNLKLTAYQDNGTSNDSGTMALMEEDESSTSST

SEQ ID NO: 1569 - protein, 1771 aa, Mason-Pfizer monkey virus
MGQELSQHERYVEQLKQALKTRGVKVKYADLLKFFDFVKDTCPWFPQEGTIDIKRWRRVGDCFQDYYNTFGPEKVPVTAFSYWNLIKELIDKKEVNPQVMAAVAQTEEILKSNSQTDLTKTSQNPDLDLISLDSDDEGAKSSSLQDKGLSSTKKPKRFPVLLTAQTSKDPEDPNPSEVDWDGLEDEAAKYHNPDWPPFLTRPPPYNKATPSAPTVMAVVNPKEELKEKIAQLEEQIKLEELHQALISKLQKLKTGNETVTHPDTAGGLSRTPHWPGQHIPKGKCCASREKEEQIPKDIFPVTETVDGQGQAWRHHNGFDFAVIKELKTAASQYGATAPYTLAIVESVADNWLTPTDWNTLVRAVLSGGDHLLWKSEFFENCRDTAKRNQQAGNGWDFDMLTGSGNYSSTDAQMQYDPGLFAQIQAAATKAWRKLPVKGDPGASLTGVKQGPDEPFADFVHRLITTAGRIFGSAEAGVDYVKQLAYENANPACQAAIRPYRKKTDLTGYIRLCSDIGPSYQQGLAMAAAFSGQTVKDFLNNKNKEKGGCCFKCGKKGHFAKNCHEHAHNNAEPKVPGLCPRCKRGKHWANECKSKTDNQGNPIPPHQGNRVEGPAPGPETSLWGSQLCSSQQKQPISKLTRATPGSAGLDLCSTSHTVLTPEMGPQALSTGIYGPLPPNTFGLILGRSSITMKGLQVYPGVIDNDYTGEIKIMAKAVNNIVTVSQGNRIAQLILLPLIETDNKVQQPYRGQGSFGSSDIYWVQPITCQKPSLTLWLDDKMFTGLIDTGADVTIIKLEDWPPNWPITDTLTNLRGIGQSNNPKQSSKYLTWRDKENNSGLIKPFVIPNLPVNLWGRDLLSQMKIMMCSPNDIVTAQMLAQGYSPGKGLGKKENGILHPIPNQGQSNKKGFGNFLTAAIDILAPQQCAEPITWKSDEPVWVDQWPLTNDKLAAAQQLVQEQLEAGHITESSSPWNTPIFVIKKKSGKWRLLQDLRAVNATMVLMGALQPGLPSPVAIPQGYLKIIIDLKDCFFSIPLHPSDQKRFAFSLPSTNFKEPMQRFQWKVLPQGMANSPTLCQKYVATAIHKVRHAWKQMYIIHYMDDILIAGKDGQQVLQCFDQLKQELTAAGLHIAPEKVQLQDPYTYLGFELNGPKITNQKAVIRKDKLQTLNDFQKLLGDINWLRPYLKLTTGDLKPLFDTLKGDSDPNSHRSLSKEALASLEKVETAIAEQFVTHINYSLPLIFLIFNTALTPTGLFWQDNPIMWIHLPASPKKVLLPYYDAIADLIILGRDHSKKYFGIEPSTIIQPYSKSQIDWLMQNTEMWPIACASFVGILDNHYPPNKLIQFCKLHTFVFPQIISKTPLNNALLVFTDGSSTGMAAYTLTDTTIKFQTNLNSAQLVELQALIAVLSAFPNQPLNIYTDSAYLAHSIPLLETVAQIKHISETAKLFLQCQQLIYNRSIPFYIGHVRAHSGLPGPIAQGNQRADLATKIVASNINTNLESAQNAHTLHHLNAQTLRLMFNIPREQARQIVKQCPICVTYLPVPHLGVNPRGLFPNMIWQMDVTHYSEFGNLKYIHVSIDTFSGFLLATLQTGETTKHVITHLLHCFSIIGLPKQIKTDNGPGYTSKNFQEFCSTLQIKHITGIPYNPQGQGIVERAHLSLKTTIEKIKKGEWYPRKGTPRNILNHALFILNFLNLDDQNKSAADRFWHNNPKKQFAMVKWKDPLDNTWHGPDPVLIWGRGSVCVYSQTYDAARWLPERLVRQVSNNNQSRE

SEQ ID NO: 1570 - protein, 1755 aa, Mouse mammary tumor virus
MGVSGSKGQKLFVSVLQRLLSERGLHVKESSAIEFYQFLIKVSPWFPEEGGLNLQDWKRVGREMKRYAAEHGTDSIPKQAYPIWLQLREILTEQSDLVLLSAEAKSVTEEELEEGLTGLLSTSSQEKTYGTRGTAYAEIDTEVDKLSEHIYDEPYEEKEKADKNEEKDHVRKIKKVVQRKENSEGKRKEKDSKAFLATDWNDDDLSPEDWDDLEEQAAHYHDDDELILPVKRKVVKKKPQALRRKPLPPVGFAGAMAEAREKGDLTFTFPVVFMGESDEDDTPVWEPLPLKTLKELQSAVRTMGPSAPYTLQVVDMVASQWLTPSDWHQTARATLSPGDYVLWRTEYEEKSKEMVQKAAGKRKGKVSLDMLLGTGQFLSPSSQIKLSKDVLKDVTTNAVLAWRAIPPPGVKKTVLAGLKQGNEESYETFISRLEEAVYRMMPRGEGSDILIKQLAWENANSLCQDLIRPIRKTGTIQDYIRACLDASPAVVQGMAYAAAMRGQKYSTFVKQTYGGGKGGQGAEGPVCFSCGKTGHIRKDCKDEKGSKRAPPGLCPRCKKGYHWKSECKSKFDKDGNPLPPLETNAENSKNLVKGQSPSPAQKGDGVKGSGLNPEAPPFTIHDLPRGTPGSAGLDLSSQKDLILSLEDGVSLVPTLVKGTLPEGTTGLIIGRSSNYKKGLEVLPGVIDSDFQGEIKVMVKAAKNAVIIHKGERIAQLLLLPYLKLPNPVIKEERGSEGFGSTSHVHWVQEISDSRPMLHIYLNGRRFLGLLDTGADKTCIAGRDWPANWPIHQTESSLQGLGMACGVARSSQPLRWQHEDKSGIIHPFVIPTLPFTLWGRDIMKDIKVRLMTDSPDDSQDLMIGAIESNLFADQISWKSDQPVWLNQWPLKQEKLQALQQLVTEQLQLGHLEESNSPWNTPVFVIKKKSGKWRLLQDLRAVNATMHDMGALQPGLPSPVAVPKGWEIIIIDLQDCFFNIKLHPEDCKRFAFSVPSPNFKRPYQRFQWKVLPQGMKNSPTLCQKFVDKAILTVRDKYQDSYIVHYMDDILLAHPSRSIVDEILTSMIQALNKHGLVVSTEKIQKYDNLKYLGTHIQGDSVSYQKLQIRTDKLRTLNDFQKLLGNINWIRPFLKLTTGELKPLFEILNGDSNPISTRKLTPEACKALQLMNERLSTARVKRLDLSQPWSLCILKTEYTPTACLWQDGVVEWIHLPHISPKVITPYDIFCTQLIIKGRHRSKELFSKDPDYIVVPYTKVQFDLLLQEKEDWPISLLGFLGEVHFHLPKDPLLTFTLQTAIIFPHMTSTTPLEKGIVIFTDGSANGRSVTYIQGREPIIKENTQNTAQQAEIVAVITAFEEVSQPFNLYTDSKYVTGLFPEIETATLSPRTKIYTELKHLQRLIHKRQEKFYIGHIRGHTGLPGPLAQGNAYADSLTRILTALESAQESHALHHQNAAALRFQFHITREQAREIVKLCPNCPDWGHAPQLGVNPRGLKPRVLWQMDVTHVSEFGKLKYVHVTVDTYSHFTFATARTGEATKDVLQHLAQSFAYMGIPQKIKTDNAPAYVSRSIQEFLARWKISHVTGIPYNPQGQAIVERTHQNIKAQLNKLQKAGKYYTPHHLLAHALFVLNHVNMDNQGHTAAERHWGPISADPKPMVMWKDLLTGSWKGPDVLITAGRGYACVFPQDAETPIWVPDRFIRPFTERKEATPTPGTAEKTPPRDEKDQQESPKNESSPHQREDGLATSAGVDLRSGGGP

SEQ ID NO: 1571 - protein, 1738 aa, Murine leukemia virus
MGQTVTTPLSLTLGHWKDVERIAHNQSVDVKKRRWVTFCSAEWPTFNVGWPRDGTFNRDLITQVKIKVFSPGPHGHPDQVPYIVTWEALAFDPPPWVKPFVHPKPPPPLPPSAPSLPLEPPRSTPPRSSLYPALTPSLGAKPKPQVLSDSGGPLIDLLTEDPPPYRDPRPPPSDRDGNGGEATPAGEAPDPSPMASRLRGRREPPVADSTTSQAFPLRAGGNGQLQYWPFSSSDLYNWKNNNPSFSEDPGKLTALIESVLITHQPTWDDCQQLLGTLLTGEEKQRVLLEARKAVRGDDGRPTQLPNEVDAAFPLERPDWDYTTQAGRNHLVHYRQLLLAGLQNAGRSPTNLAKVKGITQGPNESPSAFLERLKEAYRRYTPYDPEDPGQETNVSMSFIWQSAPDIGRKLERLEDLKNKTLGDLVREAEKIFNKRETPEEREERIRRETEEKEERRRTEDEQKEKERDRRRHREMSKLLATVVSGQKQDRQGGERRRSQLDRDQCAYCKEKGHWAKDCPKKPRGPRGPRPQTSLLTLDDQGGQGQEPPPEPRITLKVGGQPVTFLVDTGAQHSVLTQNPGPLSDKSAWVQGATGGKRYRWTTDRKVHLATGKVTHSFLHVPDCPYPLLGRDLLTKLKAQIHFEGSGAQVMGPMGQPLQVLTLNIEDEHRLHETSKEPDVSLGSTWLSDFPQAWAETGGMGLAVRQAPLIIPLKATSTPVSIKQYPMSQEARLGIKPHIQRLLDQGILVPCQSPWNTPLLPVKKPGTNDYRPVQDLREVNKRVEDIHPTVPNPYNLLSGLPPSHQWYTVLDLKDAFFCLRLHPTSQPLFAFEWRDPEMGISGQLTWTRLPQGFKNSPTLFDEALHRDLADFRIQHPDLILLQYVDDLLLAATSELDCQQGTRALLQTLGNLGYRASAKKAQICQKQVKYLGYLLKEGQRWLTEARKETVMGQPTPKTPRQLREFLGTAGFCRLWIPGFAEMAAPLYPLTKTGTLFNWGPDQQKAYQEIKQALLTAPALGLPDLTKPFELFVDEKQGYAKGVLTQKLGPWRRPVAYLSKKLDPVAAGWPPCLRMVAAIAVLTKDAGKLTMGQPLVILAPHAVEALVKQPPDRWLSNARMTHYQALLLDTDRVQFGPVVALNPATLLPLPEEGLQHNCLDILAEAHGTRPDLTDQPLPDADHTWYTDGSSLLQEGQRKAGAAVTTETEVIWAKALPAGTSAQRAELIALTQALKMAEGKKLNVYTDSRYAFATAHIHGEIYRRRGLLTSEGKEIKNKDEILALLKALFLPKRLSIIHCPGHQKGHSAEARGNRMADQAARKAAITETPDTSTLLIENSSPYTSEHFHYTVTDIKDLTKLGAIYDKTKKYWVYQGKPVMPDQFTFELLDFLHQLTHLSFSKMKALLERSHSPYYMLNRDRTLKNITETCKACAQVNASKSAVKQGTRVRGHRPGTHWEIDFTEIKPGLYGYKYLLVFIDTFSGWIEAFPTKKETAKVVTKKLLEEIFPRFGMPQVLGTDNGPAFVSKVSQTVADLLGIDWKLHCAYRPQSSGQVERMNRTIKETLTKLTLATGSRDWVLLLPLALYRARNTPGPHGLTPYEILYGAPPPLVNFPDPDMTRVTNSPSLQAHLQALYLVQHEVWRPLAAAYQEQLDRPVVPHPYRVGDTVWVRRHQTKNLEPRWKGPYTVLLTTPTALKVDGIAAWIHAAHVKAADPGGGPSSRLTWRVQRSQNPLKIRLTREAP

SEQ ID NO: 1572 - protein, 1462 aa, unidentified
  source 1..1462: note = Description of Unknown: Human T-cell leukemia virus 1 sequence
MGQIFSRSASPIPRPPRGLAAHHWLNFLQAAYRLEPGPSSYDFHQLKKFLKIALETPARICPINYSLLASLLPKGYPGRVNEILHILIQTQAQIPSRPAPPPPSSPTHDPPDSDPQIPPPYVEPTAPQVLPVMHPHGAPPNHRPWQMKDLQAIKQEVSQAAPGSPQFMQTIRLAVQQFDPTAKDLQDLLQYLCSSLVASLHHQQLDSLISEAETRGITGYNPLAGPLRVQANNPQQQGLRREYQQLWLAAFAALPGSAKDPSWASILQGLEEPYHAFVERLNIALDNGLPEGTPKDPILRSLAYSNANKECQKLLQARGHTNSPLGDMLRACQTWTPKDKTKVLVVQPKKPPPNQPCFRCGKAGHWSRDCTQPRPPPGPCPLCQDPTHWKRDCPRLKPTIPEPEPEEDALLLDLPADIPHPKNLHRGGGLTSPPTLQQVLPNQDPASILPVIPLDPARRPVIKAQVDTQTSHPKTIEALLDTGADMTVLPIALFSSNTPLKNTSVLGAGGQTQDHFKLTSLPVLIRLPFRTTPIVLTSCLVDTKNNWAIIGRDALQQCQGVLYLPEAKRPPVILPIQAPAVLGLEHLPRPPQISQFPLNPERLQALQHLVRKALEAGHIEPYTGPGNNPVFPVKKANGTWRFIHDLRATNSLTIDLSSSSPGPPDLSSLPTTLAHLQTIDLRDAFFQIPLPKQFQPYFAFTVPQQCNYGPGTRYAWKVLPQGFKNSPTLFEMQLAHILQPIRQAFPQCTILQYMDDILLASPSHEDLLLLSEATMASLISHGLPVSENKTQQTPGTIKFLGQIISPNHLTYDAVPTVPIRSRWALPELQALLGEIQWVSKGTPTLRQPLHSLYCALQRHTDPRDQIYLNPSQVQSLVQLRQALSQNCRSRLVQTLPLLGAIMLTLTGTTTVVFQSKEQWPLVWLHAPLPHTSQCPWGQLLASAVLLLDKYTLQSYGLLCQTIHHNISTQTFNQFIQTSDHPSVPILLHHSHRFKNLGAQTGELWNTFLKTAAPLAPVKALMPVFTLSPVIINTAPCLFSDGSTSRAAYILWDKQILSQRSFPLPPPHKSAQRAELLGLLHGLSSARSWRCLNIFLDSKYLYHYLRTLALGTFQGRSSQAPFQALLPRLLSRKVVYLHHVRSHTNLPDPISRLNALTDALLITPVLQLSPAELHSFTHCGQTALTLQGATTTEASNILRSCHACRGGNPQHQMPRGHIRRGLLPNHIWQGDITHFKYKNTLYRLHVWVDTFSGAISATQKRKETSSEAISSLLQAIAHLGKPSYINTDNGPAYISQDFLNMCTSLAIRHTTHVPYNPTSSGLVERSNGILKTLLYKYFTDKPDLPMDNALSIALWTINHLNVLTNCHKTRWQLHHSPRLQPIPETRSLSNKQTHWYYFKLPGLNSRQWKGPQEALQEAAGAALIPVSASSAQWIPWRLLKRAACPRPVGGPADPKEKDLQHHG

SEQ ID NO: 1573 - protein, 1143 aa, unidentified
  source 1..1143: note = Description of Unknown: Human spumaretrovirus sequence
MNPLQLLQPLPAEIKGTKLLAHWDSGATITCIPESFLEDEQPIKKTLIKTIHGEKQQNVYYVTFKVKGRKVEAEVIASPYEYILLSPTDVPWLTQQPLQLTILVPLQEYQEKILSKTALPEDQKQQLKTLFVKYDNLWQHWENQVGHRKIRPHNIATGDYPPRPQKQYPINPKAKPSIQIVIDDLLKQGVLTPQNSTMNTPVYPVPKPDGRWRMVLDYREVNKTIPLTAAQNQHSAGILATIVRQKYKTTLDLANGFWAHPITPESYWLTAFTWQGKQYCWTRLPQGFLNSPALFTADVVDLLKEIPNVQVYVDDIYLSHDDPKEHVQQLEKVFQILLQAGYVVSLKKSEIGQKTVEFLGFNITKEGRGLTDTFKTKLLNITPPKDLKQLQSILGLLNFARNFIPNFAELVQPLYNLIASAKGKYIEWSEENTKQLNMVIEALNTASNLEERLPEQRLVIKVNTSPSAGYVRYYNETGKKPIMYLNYVFSKAELKFSMLEKLLTTMHKALIKAMDLAMGQEILVYSPIVSMTKIQKTPLPERKALPIRWITWMTYLEDPRIQFHYDKTLPELKHIPDVYTSSQSPVKHPSQYEGVFYTDGSAIKSPDPTKSNNAGMGIVHATYKPEYQVLNQWSIPLGNHTAQMAEIAAVEFACKKALKIPGPVLVITDSFYVAESANKELPYWKSNGFVNNKKKPLKHISKWKSIAECLSMKPDITIQHEKGISLQIPVFILKGNALADKLATQGSYVVNCNTKKPNLDAELDQLLQGHYIKGYPKQYTYFLEDGKVKVSRPEGVKIIPPQSDRQKIVLQAHNLAHTGREATLLKIANLYWWPNMRKDVVKQLGRCQQCLITNASNKASGPILRPDRPQKPFDKFFIDYIGPLPPSQGYLYVLVVVDGMTGFTWLYPTKAPSTSATVKSLNVLTSIAIPKVIHSDQGAAFTSSTFAEWAKERGIHLEFSTPYHPQSGSKVERKNSDIKRLLTKLLVGRPTKWYDLLPVVQLALNNTYSPVLKYTPHQLLFGIDSNTPFANQDTLDLTREEELSLLQEIRTSLYHPSTPPASSRSWSPVVGQLVQERVARPASLRPRWHKPSTVLKVLNPRTVVILDHLGNNRTVSIDNLKPTSHQNGTTNDTATMDHLEKNE

SEQ ID NO: 1574 - protein, 1416 aa, Bovine leukemia virus
MGNSPSYNPPAGISPSDWLNLLQSAQRLNPRPSPSDFTDLKNYIHWFHKTQKKPWTFTSGGPTSCPPGRFGRVPLVLATLNEVLSNEGGAPGASAPEEQPPPYDPPAILPIISEGNRNRHRAWALRELQDIKKEIENKAPGSQVWIQTLRLAILQADPTPADLEQLCQYIASPVDQTAHMTSLTAAIAAAEAANTLQGFNPKTGTLTQQSAQPNAGDLRSQYQNLWLQAGKNLPTRPSAPWSTIVQGPAESSVEFVNRLQISLADNLPDGVPKEPIIDSLSYANANRECQQILQGRGPVAAVGQKLQACAQWAPKNKQPALLVHTPGPKMPGPRQPAPKRPPPGPCYRCLKEGHWARDCPTKATGPPPGPCPICKDPSHWKRDCPTLKSKNKLIEGGLSAPQTITPITDSLSEAELECLLSIPLARSRPSVAVYLSGPWLQPSQNQALMLVDTGAENTVLPQNWLVRDYPRIPAAVLGAGGVSRNRYNWLQGPLTLALKPEGPFITIPKILVDTSDKWQILGRDVPSRLQASISIPEEVRPPVVGVLDTPPSHIGLEHLPPPPEVPQFPLNLERLQALQDLVHRSLEAGYISPWDGPGNNPVFPVRKPNGAWRFVHDLRATNALTKPIPALSPGPPDLTAIPTHPPHIICLDLKDAFFQIPVEDRFRFYLSFTLPSPGGLQPHRRFAWRVLPQGFINSPALFERALQEPLRQVSAAFSQSLLVSYMDDILYASPTEEQRSQCYQALAARLRDLGFQVASEKTSQTPSPVPFLGQMVHEQIVTYQSLPTLQISSPISLHQLQAVLGDLQWVSRGTPTTRRPLQLLYSSLKRHHDPRAIIQLSPEQLQGIAELRQALSHNARSRYNEQEPLLAYVHLTRAGSTLVLFQKGAQFPLAYFQTPLTDNQASPWGLLLLLGCQYLQTQALSSYAKPILKYYHNLPKTSLDNWIQSSEDPRVQELLQLWPQISSQGIQPPGPWKTLITRAEVFLTPQFSPDPIPAALCLFSDGATGRGAYCLWKDHLLDFQAVPAPESAQKGELAGLLAGLAAAPPEPVNIWVDSKYLYSLLRTLVLGAWLQPDPVPSYALLYKSLLRHPAIVVGHVRSHSSASHPIASLNNYVDQLLPLETPEQWHKLTHCNSRALSRWPNPRISAWDPRSPATLCETCQKLNPTGGGKMRTIQRGWAPNHIWQADITHYKYKQFTYALHVFVDTYSGATHASAKRGLTTQTTIEGLLEAIVHLGRPKKLNTDQGANYTSKTFVRFCQQFGVSLSHHVPYNPTSSGLDERTNGLLKLLLSKYHLDEPHLPMTQALSRALWTHNQINLLPILKTRWELHHSPPLAVISEGGETPKGSDKLFLYLLPGQNNRRWLGPLPALVEASGGALLATDPPVWVPWRLLKAFKCLKNDGPEDAHNRSSDG

SEQ ID NO: 1575 - protein, 1220 aa, Bovine foamy virus
MPALRPLQVEIKGNHLKGYWDSGAEITCVPAIYIIEEQPVGKKLITTIHNEKEHDVYYVEMKIEKRKVQCEVIATALDYVLVAPVDIPWYKPGPLELTIKIDVESQKHTLITESTLSPQGQMRLKKLLDQYQALWQCWENQVGHRRIEPHKIATGALKPRPQKQYHINPRAKADIQIVIDDLLRQGVLRQQNSEMNTPVYPVPKADGRWRMVLDYREVNKVTPLVATQNCHSASILNTLYRGPYKSTLDLANGFWAHPIKPEDYWITAFTWGGKTYCWTVLPQGFLNSPALFTADVVDILKDIPNVQVYVDDVYVSSATEQEHLDILETIFNRLSTAGYIVSLKKSKLAKETVEFLGFSISQNGRGLTDSYKQKLMDLQPPTTLRQLQSILGLINFARNFLPNFAELVAPLYQLIPKAKGQCIPWTMDHTTQLKTIIQALNSTENLEERRPDVDLIMKVHISNTAGYIRFYNHGGQKPIAYNNALFTSTELKFTPTEKIMATIHKGLLKALDLSLGKEIHVYSAIASMTKLQKTPLSERKALSIRWLKWQTYFEDPRIKFHHDATLPDLQNLPVPQQDTGKEMTILPLLHYEAIFYTDGSAIRSPKPNKTHSAGMGIIQAKFEPDFRIVHLWSFPLGDHTAQYAEIAAFEFAIRRATGIRGPVLIVTDSNYVAKSYNEELPYWESNGFVNNKKKTLKHISKWKAIAECKNLKADIHVIHEPGHQPAEASPHAQGNALADKQAVSGSYKVFSNELKPSLDAELEQVLSTGRPNPQGYPNKYEYKLVNGLCYVDRRGEEGLKIIPPKADRVKLCQLAHDGPGSAHLGRSALLLKLQQKYWWPRMHIDASRIVLNCTVCAQTNSTNQKPRPPLVIPHDTKPFQVWYMDYIGPLPPSNGYQHALVIVDAGTGFTWIYPTKAQTANATVKALTHLTGTAVPKVLHSDQGPAFTSSILADWAKDRGIQLEHSAPYHPQSSGKVERKNSEIKRLLTKLLAGRPTKWYPLIPIVQLALNNTPNTRQKYTPHQLMYGADCNLPFENLDTLDLTREEQLAVLKEVRDGLLDLYPSPSQTTARSWTPSPGLLVQERVARPAQLRPKWRKPTPIKKVLNERTVIIDHLGQDKVVSIDNLKPAAHQKLAQTPDSAEICPSATPCPPNTSLWYDLDTGTWTCQRCGYQCPDKYHQPQCTWSCEDRCGHRWKECGNCIPQDGSSDDASAVAAVEI

SEQ ID NO: 1576 - protein, 900 aa, Avian myeloblastosis virus
RATVLTVALHLAIPLKWKPNHTPVWIDQWPLPEGKLVALTQLVEKELQLGHIEPSLSCWNTPVFVIRKASGSYRLLHDLRAVNAKLVPFGAVQQGAPVLSALPRGWPLMVLDLKDCFFSIPLAEQDREAFAFTLPSVNNQAPARRFQWKVLPQGMTCSPTICQLIVGQILEPLRLKHPSLRMLHYMDDLLLAASSHDGLEAAGEEVISTLERAGFTISPDKVQREPGVQYLGYKLGSTYVAPVGLVAEPRIATLWDVQKLVGSLQSVRPALGIPPRLMGPFYEQLRGSDPNEAREWNLDMKMAWREIVQLSTTAALERWDPALPLEGAVARCEQGAIGVLGQGLSTHPRPCLWLFSTQPTKAFTAWLEVLTLLITKLRASAVRTFGKEVDILLLPACFREDLPLPEGILLALRGFAGKIRSSDTPSIFDIARPLHVSLKVRVTDHPVPGPTVFTDASSSTHKGVVVWREGPRWEIKEIADLGASVQQLEARAVAMALLLWPTTPTNVVTDSAFVAKMLLKMGQEGVPSTAAAFILEDALSQRSAMAAVLHVRSHSEVPGFFTEGNDVADSQATFQAYPLREAKDLHTALHIGPRALSKACNISMQQAREVVQTCPHCNSAPALEAGVNPRGLGPLQIWQTDFTLEPRMAPRSWLAVTVDTASSAIVVTQHGRVTSVAAQHHWATAIAVLGRPKAIKTDNGSCFTSKSTREWLARWGIAHTTGIPGNSQGQAMVERANRLLKDKIRVLAEGDGFMKRIPTSKQGELLAKAMYALNHFERGENTKTPIQKHWRPTVLTEGPPVKIRIETGEWEKGWNVLVWGRGYAAVKNRDTDKVIWVPSRKVKPDITQKDEVTKKDEASPLFAGISDWAPWEGEQEGLQEETASNKQERPGEDTPAANES

SEQ ID NO: 1577 - protein, 1448 aa, Simian immunodeficiency virus
MGARNSVLSGKKADELEKIRLRPGGKKKYMLKHVVWAANELDRFGLAESLLENKEGCQKILSVLAPLVPTGSENLKSLYNTVCVIWCIHAEEKVKHTEEAKQIVQRHLVMETGTAETMPKTSRPTAPFSGRGGNYPVQQIGGNYTHLPLSPRTLNAWVKLIEEKKFGAEVVSGFQALSEGCLPYDINQMLNCVGDHQAAMQIIRDIINEEAADWDLQHPQQAPQQGQLREPSGSDIAGTTSTVEEQIQWMYRQQNPIPVGNIYRRWIQLGLQKCVRMYNPTNILDVKQGPKEPFQSYVDRFYKSLRAEQTDPAVKNWMTQTLLIQNANPDCKLVLKGLGTNPTLEEMLTACQGVGGPGQKARLMAEALKEALAPAPIPFAAAQQKGPRKPIKCWNCGKEGHSARQCRAPRRQGCWKCGKMDHVMAKCPNRQAGFFRPWPLGKEAPQFPHGSSASGADANCSPRRTSCGSAKELHALGQAAERKQREALQGGDRGFAAPQFSLWRRPVVTAHIEGQPVEVLLDTGADDSIVTGIELGPHYTPKIVGGIGGFINTKEYKNVEIEVLGKRIKGTIMTGDTPINIFGRNLLTALGMSLNLPIAKVEPVKSPLKPGKDGPKLKQWPLSKEKIVALREICEKMEKDGQLEEAPPTNPYNTPTFAIKKKDKNKWRMLIDFRELNRVTQDFTEVQLGIPHPAGLAKRKRITVLDIGDAYFSIPLDEEFRQYTAFTLPSVNNAEPGKRYIYKVLPQGWKGSPAIFQYTMRHVLEPFRKANPDVTLVQYMDDILIASDRTDLEHDRVVLQLKELLNSIGFSSPEEKFQKDPPFQWMGYELWPTKWKLQKIELPQRETWTVNDIQKLVGVLNWAAQIYPGIKTKHLCRLIRGKMTLTEEVQWTEMAEAEYEENKIILSQEQEGCYYQESKPLEATVIKSQDNQWSYKIHQEDKILKVGKFAKIKNTHTNGVRLLAHVIQKIGKEAIVIWGQVPKFHLPVEKDVWEQWWTDYWQVTWIPEWDFISTPPLVRLVFNLVKDPIEGEETYYVDGSCSKQSKEGKAGYITDRGKDKVKVLEQTTNQQAELEAFLMALTDSGPKANIIVDSQYVMGIITGCPTESESRLVNQIIEEMIKKTEIYVAWVPAHKGIGGNQEIDHLVSQGIRQVLFLEKIEPAQEEHSKYHSNIKELVFKFGLPRLVAKQIVDTCDKCHQKGEAIHGQVNSDLGTWQMDCTHLEGKIVIVAVHVASGFIEAEVIPQETGRQTALFLLKLASRWPITHLHTDNGANFASQEVKMVAWWAGIEHTFGVPYNPQSQGVVEAMNHHLKNQIDRIREQANSVETIVLMAVHCMNFKRRGGIGDMTPAERLINMITTEQEIQFQQSKNSKFKNFRVYYREGRDQLWKGPGELLWKGEGAVILKVGTDIKVVPRRKAKIIKDYGGGKEMDSSSHMEDTGEAREVA

SEQ ID NO: 1578 - protein, 1603 aa, Rous sarcoma virus
MEAVIKVISSACKTYCGKTSPSKKEIGAMLSLLQKEGLLMSPSDLYSPGSWDPITAALSQRAMILGKSGELKTWGLVLGALKAAREEQVTSEQAKFWLGLGGGRVSPPGPECIEKPATERRIDKGEEVGETTVQRDAKMAPEETATPKTVGTSCYHCGTAIGCNCATASAPPPPYVGSGLYPSLAGVGEQQGQGGDTPPGAEQSRAEPGHAGQAPGPALTDWARVREELASTGPPVVAMPVVIKTEGPAWTPLEPKLITRLADTVRTKGLRSPITMAEVEALMSSPLLPHDVTNLMRVILGPAPYALWMDAWGVQLQTVIAAATRDPRHPANGQGRGERTNLNRLKGLADGMVGNPQGQAALLRPGELVAITASALQAFREVARLAEPAGPWADIMQGPSESFVDFANRLIKAVEGSDLPPSARAPVIIDCFRQKSQPDIQQLIRTAPSTLTTPGEIIKYVLDRQKTAPLTDQGIAAAMSSAIQPLIMAVVNRERDGQTGSGGRARGLCYTCGSPGHYQAQCPKKRKSGNSRERCQLCNGMGHNAKQCRKRDGNQGQRPGKGLSSGPWPGPEPPAVSLAMTMEHKDRPLVRVILTNTGSHPVKQRSVYITALLDSGADITIISEEDWPTDWPVMEAANPQIHGIGGGIPMRKSRDMIELGVINRDGSLERPLLLFPAVAMVRGSILGRDCLQGLGLRLTNLIGRATVLTVALHLAIPLKWKPDHTPVWIDQWPLPEGKLVALTQLVEKELQLGHIEPSLSCWNTPVFVIRKASGSYRLLHDLRAVNAKLVPFGAVQQGAPVLSALPRGWPLMVLDLKDCFFSIPLAEQDREAFAFTLPSVNNQAPARRFQWKVLPQGMTCSPTICQLVVGQVLEPLRLKHPSLCMLHYMDDLLLAASSHDGLEAAGEEVISTLERAGFTISPDKVQREPGVQYLGYKLGSTYVAPVGLVAEPRIATLWDVQKLVGSLQWLRPALGIPPRLMGPFYEQLRGSDPNEAREWNLDMKMAWREIVRLSTTAALERWDPALPLEGAVARCEQGAIGVLGQGLSTHPRPCLWLFSTQPTKAFTAWLEVLTLLITKLRASAVRTFGKEVDILLLPACFREDLPLPEGILLALKGFAGKIRSSDTPSIFDIARPLHVSLKVRVTDHPVPGPTVFTDASSSTHKGVVVWREGPRWEIKEIADLGASVQQLEARAVAMALLLWPTTPTNVVTDSAFVAKMLLKMGQEGVPSTAAAFILEDALSQRSAMAAVLHVRSHSEVPGFFTEGNDVADSQATFQAYPLREAKDLHTALHIGPRALSKACNISMQQAREVVQTCPHCNSAPALEAGVNPRGLGPLQIWQTDFTLEPRMAPRSWLAVTVDTASSAIVVTQHGRVTSVAVQHHWATAIAVLGRPKAIKTDNGSCFTSKSTREWLARWGIAHTTGIPGNSQGQAMVERANRLLKDRIRVLAEGDGFMKRIPTSKQGELLAKAMYALNHFERGENTKTPIQKHWRPTVLTEGPPVKIRIETGEWEKGWNVLVWGRGYAAVKNRDTDKVIWVPSRKVKPDITQKDEVTKKDEASPLFAGISDWIPWEDEQEGLQGETASNKQERPGEDTLAANES

SEQ ID NO: 1579 - protein, 1465 aa, Human immunodeficiency virus 2
MGARGSVLSGKKTDELEKVRLRPGGKKKYMLKHVVWAVNELDRFGLAESLLESKEGCQKILKVLAPLVPTGSENLKSLFNIVCVIFCLHAEEKVKDTEEAKKIAQRHLAADTEKMPATNKPTAPPSGGNYPVQQLAGNYVHLPLSPRTLNAWVKLVEEKKFGAEVVPGFQALSEGCTPYDINQMLNCVGEHQAAMQIIREIINEEAADWDQQHPSPGPMPAGQLRDPRGSDIAGTTSTVEEQIQWMYRAQNPVPVGNIYRRWIQLGLQKCVRMYNPTNILDIKQGPKEPFQSYVDRFYKSLRAEQTDPAVKNWMTQTLLIQNANPDCKLVLKGLGMNPTLEEMLTACQGIGGPGQKARLMAEALKEALTPAPIPFAAVQQKAGKRGTVTCWNCGKQGHTARQCRAPRRQGCWKCGKTGHIMSKCPERQAGFLRVRTLGKEASQLPHDPSASGSDTICTPDEPSRGHDTSGGDTICAPCRSSSGDAEKLHADGETTEREPRETLQGGDRGFAAPQFSLWRRPVVKACIEGQSVEVLLDTGVDDSIVAGIELGSNYTPKIVGGIGGFINTKEYKDVEIEVVGKRVRATIMTGDTPINIFGRNILNTLGMTLNFPVAKVEPVKVELKPGKDGPKIRQWPLSREKILALKEICEKMEKEGQLEEAPPTNPYNTPTFAIKKKDKNKWRMLIDFRELNKVTQDFTEVNWVFPTRQVAEKRRITVIDVGDAYFSIPLDPNFRQYTAFTLPSVNNAEPGKRYIYKVLPQGWKGSQSICQYSMRKVLDPFRKANSDVIIIQYMDDILIASDRSDLEHDRVVSQLKELLNDMGFSTPEEKFQKDPPFKWMGYELWPKKWKLQKIQLPEKEVWTVNAIQKLVGVLNWAAQLFPGIKTRHICKLIRGKMTLTEEVQWTELAEAELQENKIILEQEQEGSYYKERVPLEATVQKNLANQWTYKIHQGNKVLKVGKYAKVKNTHTNGVRLLAHVVQKIGKEALVIWGEIPVFHLPVERETWDQWWTDYWQVTWIPEWDFVSTPPLIRLAYNLVKDPLEGRETYYTDGSCNRTSKEGKAGYVTDRGKDKVKVLEQTTNQQAELEAFALALTDSEPQVNIIVDSQYVMGIIAAQPTETESPIVAKIIEEMIKKEAVYVGWVPAHKGLGGNQEVDHLVSQGIRQVLFLEKIEPAQEEHEKYHGNVKELVHKFGIPQLVAKQIVNSCDKCQQKGEAIHGQVNADLGTWQMDCTHLEGKIIIVAVHVASGFIEAEVIPQETGRQTALFLLKLASRWPITHLHTDNGANFTSPSVKMVAWWVGIEQTFGVPYNPQSQGVVEAMNHHLKNQIDRLRDQAVSIETVVLMATHCMNFKRRGGIGDMTPAERLVNMITTEQEIQFFQAKNLKFQNFQVYYREGRDQLWKGPGELLWKGEGAVIIKVGTEIKVVPRRKAKIIRHYGGGKGLDCSADMEDTRQAREMAQSD

SEQ ID NO: 1580 - protein, 1437 aa, Human immunodeficiency virus 1
MGARASVLSGGELDKWEKIRLRPGGKKKYKLKHIVWASRELERFAVNPGLLETSEGCRQILGQLQPSLQTGSEELRSLYNTVATLYCVHQRIDVKDTKEALEKIEEEQNKSKKKAQQAAAAAGTGNSSQVSQNYPIVQNLQGQMVHQAISPRTLNAWVKVVEEKAFSPEVIPMFSALSEGATPQDLNTMLNTVGGHQAAMQMLKETINEEAAEWDRVHPVHAGPIAPGQMREPRGSDIAGTTSTLQEQIGWMTNNPPIPVGEIYKRWIILGLNKIVRMYSPTSILDIRQGPKEPFRDYVDRFYKTLRAEQASQDVKNWMTETLLVQNANPDCKTILKALGPAATLEEMMTACQGVGGPGHKARVLAEAMSQVTNPANIMMQRGNFRNQRKTVKCFNCGKEGHIAKNCRAPRKKGCWRCGREGHQMKDCTERQANFLREDLAFLQGKAREFSSEQTRANSPTRRELQVWGGENNSLSEAGADRQGTVSFNFPQITLWQRPLVTIRIGGQLKEALLDTGADDTVLEEMNLPGKWKPKMIGGIGGFIKVRQYDQIPVEICGHKAIGTVLVGPTPVNIIGRNLLTQIGCTLNFPISPIETVPVKLKPGMDGPKVKQWPLTEEKIKALVEICTEMEKEGKISKIGPENPYNTPVFAIKKKDSTKWRKLVDFRELNKRTQDFWEVQLGIPHPAGLKKKKSVTVLDVGDAYFSVPLDKDFRKYTAFTIPSINNETPGIRYQYNVLPQGWKGSPAIFQSSMTKILEPFRKQNPDIVIYQYMDDLYVGSDLEIGQHRTKIEELRQHLLRWGFTTPDKKHQKEPPFLWMGYELHPDKWTVQPIMLPEKDSWTVNDIQKLVGKLNWASQIYAGIKVKQLCKLLRGTKALTEVIPLTEEAELELAENREILKEPVHEVYYDPSKDLVAEIQKQGQGQWTYQIYQEPFKNLKTGKYARMRGAHTNDVKQLTEAVQKVSTESIVIWGKIPKFKLPIQKETWEAWWMEYWQATWIPEWEFVNTPPLVKLWYQLEKEPIVGAETFYVDGAANRETKLGKAGYVTDRGRQKVVSIADTTNQKTELQAIHLALQDSGLEVNIVTDSQYALGIIQAQPDKSESELVSQIIEQLIKKEKVYLAWVPAHKGIGGNEQVDKLVSAGIRKVLFLNGIDKAQEEHEKYHSNWRAMASDFNLPPVVAKEIVASCDKCQLKGEAMHGQVDCSPGIWQLDCTHLEGKIILVAVHVASGYIEAEVIPAETGQETAYFLLKLAGRWPVKTIHTDNGSNFTSTTVKAACWWAGIKQEFGIPYNPQSQGVVESMNNELKKIIGQVRDQAEHLKTAVQMAVFIHNFKRKGGIGGYSAGERIVDIIATDIQTKELQKQITKIQNFRVYYRDNKDPLWKGPAKLLWKGEGAVVIQDNSDIKVVPRRKAKIIRDYGKQMAGDDCVASRQDED

SEQ ID NO: 1581 - protein, 1124 aa, Feline immunodeficiency virus
KEFGKLEGGASCSPSESNAASSNAICTSNGGETIGFVNYNKVGTTTTLEKRPEILIFVNGYPIKFLLDTGADITILNRRDFQVKNSIENGRQNMIGVGGGKRGTNYINVHLEIRDENYKTQCIFGNVCVLEDNSLIQPLLGRDNMIKFNIRLVMAQISDKIPVVKVKMKDPNKGPQIKQWPLTNEKIEALTEIVERLEKEGKVKRADSNNPWNTPVFAIKKKSGKWRMLIDFRELNKLTEKGAEVQLGLPHPAGLQIKKQVTVLDIGDAYFTIPLDPDYAPYTAFTLPRKNNAGPGRRFVWCSLPQGWILSPLIYQSTLDNIIQPFIRQNPQLDIYQYMDDIYIGSNLSKKEHKEKVEELRKLLLWWGFETPEDKLQEEPPYTWMGYELHPLTWTIQQKQLDIPEQPTLNELQKLAGKINWASQAIPDLSIKALTNMMRGNQNLNSTRQWTKEARLEVQKAKKAIEEQVQLGYYDPSKELYAKLSLVGPHQISYQVYQKDPEKILWYGKMSRQKKKAENTCDIALRACYKIREESIIRIGKEPRYEIPTSREAWESNLINSPYLKAPPPEVEYIHAALNIKRALSMIKDAPIPGAETWYIDGGRKLGKAAKAAYWTDTGKWRVMDLEGSNQKAEIQALLLALKAGSEEMNIITDSQYVINIILQQPDMMEGIWQEVLEELEKKTAIFIDWVPGHKGIPGNEEVDKLCQTMMIIEGDGILDKRSEDAGYDLLAAKEIHLLPGEVKVIPTGVKLMLPKGYWGLIIGKSSIGSKGLDVLGGVIDEGYRGEIGVIMINVSRKSITLMERQKIAQLIILPCKHEVLEQGKVVMDSERGDNGYGSTGVFSSWVDRIEEAEINHEKFHSDPQYLRTEFNLPKMVAEEIRRKCPVCRIIGEQVGGQLKIGPGIWQMDCTHFDGKIILVGIHVESGYIWAQIISQETADCTVKAVLQLLSAHNVTELQTDNGPNFKNQKMEGVLNYMGVKHKFGIPGNPQSQALVENVNHTLKVWIQKFLPETTSLDNALSLAVHSLNFKRRGRIGGMAPYELLAQQESLRIQDYFSAIPQKLQAQWIYYKDQKDKKWKGPMRVEYWGQGSVLLKDEEKGYFLIPRRHIRRVPEPCALPEGDE

SEQ ID NO: 1582 - protein, 1145 aa, Equine infectious anemia virus
TAWTFLKAMQKCSKKREARGSREAPETNFPDTTEESAQQICCTRDSSDSKSVPRSERNKKGIQCQGEGSSRGSQPGQFVGVTYNLEKRPTTIVLINDTPLNVLLDTGADTSVLTTAHYNRLKYRGRKYQGTGIIGVGGNVETFSTPVTIKKKGRHIKTRMLVADIPVTILGRDILQDLGAKLVLAQLSKEIKFRKIELKEGTMGPKIPQWPLTKEKLEGAKETVQRLLSEGKISEASDNNPYNSPIFVIKKRSGKWRLLQDLRELNKTVQVGTEISRGLPHPGGLIKCKHMTVLDIGDAYFTIPLDPEFRPYTAFTIPSINHQEPDKRYVWKCLPQGFVLSPYIYQKTLQEILQPFRERYPEVQLYQYMDDLFVGSNGSKKQHKELIIELRAILQKGFETPDDKLQEVPPYSWLGYQLCPENWKVQKMQLDMVKNPTLNDVQKLMGNITWMSSGVPGLTVKHIAATTKGCLELNQKVIWTEEAQKELEENNEKIKNAQGLQYYNPEEEMLCEVEITKNYEATYVIKQSQGILWAGKKIMKANKGWSTVKNLMLLLQHVATESITRVGKCPTFKVPFTKEQVMWEMQKGWYYSWLPEIVYTHQVVHDDWRMKLVEEPTSGITIYTDGGKQNGEGIAAYVTSNGRTKQKRLGPVTHQVAERMAIQMALEDTRDKQVNIVTDSYYCWKNITEGLGLEGPQNPWWPIIQNIREKEIVYFAWVPGHKGIYGNQLADEAAKIKEEIMLAYQGTQIKEKRDEDAGFDLCVPYDIMIPVSDTKIIPTDVKIQVPPNSFGWVTGKSSMAKQGLLINGGIIDEGYTGEIQVICTNIGKSNIKLIEGQKFAQLIILQHHSNSRQPWDENKISQRGDKGFGSTGVFWVENIQEAQDEHENWHTSPKILARNYKIPLTVAKQITQECPHCTKQGSGPAGCVMRSPNHWQADCTHLDNKIILHFVESNSGYIHATLLSKENALCTSLAILEWARLFSPKSLHTDNGTNFVAEPVVNLLKFLKIAHTTGIPYHPESQGIVERANRTLKEKIQSHRDNTQTLEAALQLALITCNKGRESMGGQTPWEVFITNQAQVIHEKLLLQQAQSSKKFCFYKIPGEHDWKGPTRVLWKGDGAVVVNDEGKGIIAVPLTRTKLLIKPN

SEQ ID NO: 1583 - protein, 1475 aa, Bovine immunodeficiency virus
MKRRELEKKLRKVRVTPQQDKYYTIGNLQWAIRMINLMGIKCVCDEECSAAEVALIITQFSALDLENSPIRGKEEVAIKNTLKVFWSLLAGYKPESTETALGYWEAFTYREREARADKEGEIKSIYPSLTQNTQNKKQTSNQTNTQSLPAITTQDGTPRFDPDLMKQLKIWSDATERNGVDLHAVNILGVITANLVQEEIKLLLNSTPKWRLDVQLIESKVREKENAHRTWKQHHPEAPKTDEIIGKGLSSAEQATLISVECRETFRQWVLQAAMEVAQAKHATPGPINIHQGPKEPYTDFINRLVAALEGMAAPETTKEYLLQHLSIDHANEDCQSILRPLGPNTPMEKKLEACRVVGSQKSKMQFLVAAMKEMGIQSPIPAVLPHTPEAYASQTSGPEDGRRCYGCGKTGHLKRNCKQQKCYHCGKPGHQARNCRSKNREVLLCPLWAEEPTTEQFSPEQHEFCDPICTPSYIRLDKQPFIKVFIGGRWVKGLVDTGADEVVLKNIHWDRIKGYPGTPIKQIGVNGVNVAKRKTHVEWRFKDKTGIIDVLFSDTPVNLFGRSLLRSIVTCFTLLVHTEKIEPLPVKVRGPGPKVPQWPLTKEKYQALKEIVKDLLAEGKISEAAWDNPYNTPVFVIKKKGTGRWRMLMDFRELNKITVKGQEFSTGLPYPPGIKECEHLTAIDIKDAYFTIPLHEDFRPFTAFSVVPVNREGPIERFQWNVLPQGWVCSPAIYQTTTQKIIENIKKSHPDVMLYQYMDDLLIGSNRDDHKQIVQEIRDKLGSYGFKTPDEKVQEERVKWIGFELTPKKWRFQPRQLKIKNPLTVNELQQLVGNCVWVQPEVKIPLYPLTDLLRDKTNLQEKIQLTPEAIKCVEEFNLKLKDPEWKDRIREGAELVIKIQMVPRGIVFDLLQDGNPIWGGVKGLNYDHSNKIKKILRTMNELNRTVVIMTGREASFLLPGSSEDWEAALQKEESLTQIFPVKFYRHSCRWTSICGPVRENLTTYYTDGGKKGKTAAAVYWCEGRTKSKVFPGTNQQAELKAICMALLDGPPKMNIITDSRYAYEGMREEPETWAREGIWLEIAKILPFKQYVGVGWVPAHKGIGGNTEADEGVKKALEQMAPCSPPEAILLKPGEKQNLETGIYMQGLRPQSFLPRADLPVAITGTMVDSELQLQLLNIGTEHIRIQKDEVFMTCFLENIPSATEDHERWHTSPDILVRQFHLPKRIAKEIVARCQECKRTTTSPVRGTNPRGRFLWQMDNTHWNKTIIWVAVETNSGLVEAQVIPEETALQVALCILQLIQRYTVLHLHSDNGPCFTAHRIENLCKYLGITKTTGIPYNPQSQGVVERAHRDLKDRLAAYQGDCETVEAALSLALVSLNKKRGGIGGHTPYEIYLESEHTKYQDQLEQQFSKQKIEKWCYVRNRRKEWKGPYKVLWDGDGAAVIEEEGKTALYPHRHMRFIPPPDSDIQDGSS

SEQ ID NO: 1584 - protein, 873 aa, unidentified
  source 1..873: note = Description of Unknown: Avian leukosis and sarcoma virus sequence
TVALHLAIPLKWKPDHTPVWIDQWPLPEGKLVALTQLVEKELQLGHIEPSLSCWNTPVFVIRKASGSYRLLHDLRAVNAKLVPFGAVQQGAPVLSALPRGWPLMVLDLKDCFFSIPLAEQDREAFAFTLPSVNNQAPARRFQWKVLPQGMTCSPTICQLVVGQVLEPLRLKHPSLRMLHYMDDLLLAASSHDGLEAAGEEVISTLERAGFTISPDKIQREPGVQYLGYKLGSTYVAPVGLVAEPRIATLWDVQKLVGSLQWLRPALGIPPRLMGPFYEQLRGSDPNEAREWNLDMKMAWREIVQLSTTAALERWDPALPLEGAVARCEQGAIGVLGQGLSTHPRPCLWLFSTQPTKAFTAWLEVLTLLITKLRASAVRTFGKEVDVLLLPACFREDLPLPEGILLALRGFAGKIRSSDTPSIFDIARPLHVSLKVRVTDHPVPGPTVFTDASSSTHKGVVVWREGPRWEIKEIADLGASVQQLEARAVAMALLLWPTTPTNVVTDSAFVAKMLLKMGQEGVPSTAAAFILEDALSQRSAMAAVLHVRSHSEVPGFFTEGNDVADSQATFQAYPLREAKDLHTALHIGPRALSKACNISMQQAREVVQTCPHCNSAPALEAGVNPRGLGPLQIWQTDFTLEPRMAPRSWLAVTVATASSAIVVTQHGRVTSVAARHHWATAIAVLGRPKAIKTDNGSCFTSKSTREWLARWGIAHTTGIPGNSQGQAMVERANRLLKDKIRVLAEGDGFMKRIPTGKQGELLAKAMYALNHFERGENTKTPIQKHWRPTVLTEGPPVKIRIETGEWEKGWNVLVWGRGYAAVKNRDTDKIIWVPSRKVKPDITQKDELTKKDEASPLFAGISDWAPWKGEQEGL

SEQ ID NO: 1585 - protein, 30 aa, synthetic construct
  source 1..30: note = Description of Artificial Sequence: Synthetic polypeptide
MDSLLMNRRKFLYQFKNVRWAKGRRETYLC

SEQ ID NO: 1586 - protein, 28 aa, synthetic construct
  source 1..28: note = Description of Artificial Sequence: Synthetic peptide
PKKRKVEGADKRTADGSEFESPKKKRKV

SEQ ID NO: 1587 - protein, 22 aa, synthetic construct
  source 1..22: note = Description of Artificial Sequence: Synthetic peptide
RKSGKIAAIWKRPRKPKKKRKV

SEQ ID NO: 1588 - protein, 18 aa, synthetic construct
  source 1..18: note = Description of Artificial Sequence: Synthetic peptide
KRTADGSEFESPKKKRKV

SEQ ID NO: 1589 - protein, 17 aa, synthetic construct
  source 1..17: note = Description of Artificial Sequence: Synthetic peptide
KKTELQTTNAENKTKKL

SEQ ID NO: 1590 - protein, 19 aa, synthetic construct
  source 1..19: note = Description of Artificial Sequence: Synthetic peptide
KRGINDRNFWRGENGRKTR

SEQ ID NO: 1591 - protein, 16 aa, synthetic construct
  source 1..16: note = Description of Artificial Sequence: Synthetic peptide
KRPAATKKAGQAKKKK

SEQ ID NO: 1592 - RNA, 114 nt, Taeniopygia guttata
  source 1..114: mol_type = unassigned RNA
ggcgggagtaactatgactctcttaagggtctagttacaactgggcatcgctgcagagatcgcacctcctcgtggtcccgctggtagcccttcgaagggtgactaagtcgatct

SEQ ID NO: 1593 - protein, 29 aa, synthetic construct
  source 1..29: note = Description of Artificial Sequence: Synthetic peptide
PKKKRKVEGADKRTADGSEFESPKKKRKV

SEQ ID NO: 1594 - protein, 9 aa, unidentified
  source 1..9: note = Description of Unknown: LAGLIDADG family peptide seqeunce
LAGLIDADG

SEQ ID NO: 1595 - protein, 4 aa, synthetic construct
  source 1..4: note = Description of Artificial Sequence: Synthetic peptide
SGGS

SEQ ID NO: 1596 - protein, 4 aa, synthetic construct
  source 1..4: note = Description of Artificial Sequence: Synthetic peptide
  REGION 1..4: note = See specification as filed for detailed description of substitutions and preferred embodiments
GGGS

SEQ ID NO: 1597 - protein, 1367 aa, synthetic construct
  source 1..1367: note = Description of Artificial Sequence: Synthetic polypeptide
DKKYSIGLDIGTNSVGWAVITDEYKVPSKKFKVLGNTDRHSIKKNLIGALLFDSGETAEATRLKRTARRRYTRRKNRICYLQEIFSNEMAKVDDSFFHRLEESFLVEEDKKHERHPIFGNIVDEVAYHEKYPTIYHLRKKLVDSTDKADLRLIYLALAHMIKFRGHFLIEGDLNPDNSDVDKLFIQLVQTYNQLFEENPINASGVDAKAILSARLSKSRRLENLIAQLPGEKKNGLFGNLIALSLGLTPNFKSNFDLAEDAKLQLSKDTYDDDLDNLLAQIGDQYADLFLAAKNLSDAILLSDILRVNTEITKAPLSASMIKRYDEHHQDLTLLKALVRQQLPEKYKEIFFDQSKNGYAGYIDGGASQEEFYKFIKPILEKMDGTEELLVKLNREDLLRKQRTFDNGSIPHQIHLGELHAILRRQEDFYPFLKDNREKIEKILTFRIPYYVGPLARGNSRFAWMTRKSEETITPWNFEEVVDKGASAQSFIERMTNFDKNLPNEKVLPKHSLLYEYFTVYNELTKVKYVTEGMRKPAFLSGEQKKAIVDLLFKTNRKVTVKQLKEDYFKKIECFDSVEISGVEDRFNASLGTYHDLLKIIKDKDFLDNEENEDILEDIVLTLTLFEDREMIEERLKTYAHLFDDKVMKQLKRRRYTGWGRLSRKLINGIRDKQSGKTILDFLKSDGFANRNFMQLIHDDSLTFKEDIQKAQVSGQGDSLHEHIANLAGSPAIKKGILQTVKVVDELVKVMGRHKPENIVIEMARENQTTQKGQKNSRERMKRIEEGIKELGSQILKEHPVENTQLQNEKLYLYYLQNGRDMYVDQELDINRLSDYDVDAIVPQSFLKDDSIDNKVLTRSDKNRGKSDNVPSEEVVKKMKNYWRQLLNAKLITQRKFDNLTKAERGGLSELDKAGFIKRQLVETRQITKHVAQILDSRMNTKYDENDKLIREVKVITLKSKLVSDFRKDFQFYKVREINNYHHAHDAYLNAVVGTALIKKYPKLESEFVYGDYKVYDVRKMIAKSEQEIGKATAKYFFYSNIMNFFKTEITLANGEIRKRPLIETNGETGEIVWDKGRDFATVRKVLSMPQVNIVKKTEVQTGGFSKESILPKRNSDKLIARKKDWDPKKYGGFDSPTVAYSVLVVAKVEKGKSKKLKSVKELLGITIMERSSFEKNPIDFLEAKGYKEVKKDLIIKLPKYSLFELENGRKRMLASAGELQKGNELALPSKYVNFLYLASHYEKLKGSPEDNEQKQLFVEQHKHYLDEIIEQISEFSKRVILADANLDKVLSAYNKHRDKPIREQAENIIHLFTLTNLGAPAAFKYFDTTIDRKRYTSTKEVLDATLIHQSITGLYETRIDLSQLGGD

SEQ ID NO: 1598 - protein, 672 aa, Murine leukemia virus
TLNIEDEYRLHETSKEPDVSLGSTWLSDFPQAWAETGGMGLAVRQAPLIIPLKATSTPVSIKQYPMSQEARLGIKPHIQRLLDQGILVPCQSPWNTPLLPVKKPGTNDYRPVQDLREVNKRVEDIHPTVPNPYNLLSGLPPSHQWYTVLDLKDAFFCLRLHPTSQPLFAFEWRDPEMGISGQLTWTRLPQGFKNSPTLFDEALHRDLADFRIQHPDLILLQYVDDLLLAATSELDCQQGTRALLQTLGNLGYRASAKKAQICQKQVKYLGYLLKEGQRWLTEARKETVMGQPTPKTPRQLREFLGTAGFCRLWIPGFAEMAAPLYPLTKTGTLFNWGPDQQKAYQEIKQALLTAPALGLPDLTKPFELFVDEKQGYAKGVLTQKLGPWRRPVAYLSKKLDPVAAGWPPCLRMVAAIAVLTKDAGKLTMGQPLVILAPHAVEALVKQPPDRWLSNARMTHYQALLLDTDRVQFGPVVALNPATLLPLPEEGLQHNCLDILAEAHGTRPDLTDQPLPDADHTWYTDGSSLLQEGQRKAGAAVTTETEVIWAKALPAGTSAQRAELIALTQALKMAEGKKLNVYTDSRYAFATAHIHGEIYRRRGLLTSEGKEIKNKDEILALLKALFLPKRLSIIHCPGHQKGHSAEARGNRMADQAARKAAITETPDTSTLLI

SEQ ID NO: 1599 - protein, 660 aa, Murine leukemia virus
TLNIEDEHRLHETSKEPDVSLGSTWLSDFPQAWAETGGMGLAVRQAPLIIPLKATSTPVSIKQYPMSQEARLGIKPHIQRLLDQGILVPCQSPWNTPLLPVKKPGTNDYRPVQDLREVNKRVEDIHPTVPNPYNLLSGLPPSHQWYTVLDLKDAFFCLRLHPTSQPLFAFEWRDPEMGISGQLTWTRLPQGFKNSPTLFDEALHRDLADFRIQHPDLILLQYVDDLLLAATSELDCQQGTRALLQTLGNLGYRASAKKAQICQKQVKYLGYLLKEGQRWLTEARKETVMGQPTPKTPRQLREFLGTAGFCRLWIPGFAEMAAPLYPLTKTGTLFNWGPDQQKAYQEIKQALLTAPALGLPDLTKPFELFVDEKQGYAKGVLTQKLGPWRRPVAYLSKKLDPVAAGWPPCLRMVAAIAVLTKDAGKLTMGQPLVILAPHAVEALVKQPPDRWLSNARMTHYQALLLDTDRVQFGPVVALNPATLLPLPEEGLQHNCLDILAEAHGTRPDLTDQPLPDADHTWYTDGSSLLQEGQRKAGAAVTTETEVIWAKALPAGTSAQRAELIALTQALKMAEGKKLNVYTDSRYAFATAHIHGEIYRRRGLLTSEGKEIKNKDEILALLKALFLPKRLSIIHCPGHQKGHSAEARGNRMADQAARKAA

SEQ ID NO: 1600 - protein, 672 aa, Murine leukemia virus
TLNIEDEYRLHETSKEPDVSLGSTWLSDFPQAWAETGGMGLAVRQAPLIIPLKATSTPVSIKQYPMSQEARLGIKPHIQRLLDQGILVPCQSPWNTPLLPVKKPGTNDYRPVQDLREVNKRVEDIHPTVPNPYNLLSGLPPSHQWYTVLDLKDAFFCLRLHPTSQPLFAFEWRDPEMGISGQLTWTRLPQGFKNSPTLFNEALHRDLADFRIQHPDLILLQYVDDLLLAATSELDCQQGTRALLQTLGNLGYRASAKKAQICQKQVKYLGYLLKEGQRWLTEARKETVMGQPTPKTPRQLREFLGKAGFCRLFIPGFAEMAAPLYPLTKPGTLFNWGPDQQKAYQEIKQALLTAPALGLPDLTKPFELFVDEKQGYAKGVLTQKLGPWRRPVAYLSKKLDPVAAGWPPCLRMVAAIAVLTKDAGKLTMGQPLVILAPHAVEALVKQPPDRWLSNARMTHYQALLLDTDRVQFGPVVALNPATLLPLPEEGLQHNCLDILAEAHGTRPDLTDQPLPDADHTWYTDGSSLLQEGQRKAGAAVTTETEVIWAKALPAGTSAQRAELIALTQALKMAEGKKLNVYTDSRYAFATAHIHGEIYRRRGWLTSEGKEIKNKDEILALLKALFLPKRLSIIHCPGHQKGHSAEARGNRMADQAARKAAITETPDTSTLLI

SEQ ID NO: 1601 - protein, 33 aa, synthetic construct; identical to SEQ ID NO: 480
  source 1..33: note = Description of Artificial Sequence: Synthetic polypeptide

SEQ ID NO: 1602 - protein, 1369 aa, synthetic construct
  source 1..1369: note = Description of Artificial Sequence: Synthetic polypeptide
SMDKKYSIGLAIGTNSVGWAVITDDYKVPSKKFKVLGNTDRHSIKKNLIGALLFDSGETAEATRLKRTARRRYTRRKNRICYLQEIFSNEMAKVDDSFFHRLEESFLVEEDKKHERHPIFGNIVDEVAYHEKYPTIYHLRKKLVDSTDKADLRLIYLALAHMIKFRGHFLIEGDLNPDNSDVDKLFIQLVQTYNQLFEENPINASGVDAKAILSARLSKSRRLENLIAQLPGEKKNGLFGNLIALSLGLTPNFKSNFDLAEDAKLQLSKDTYDDDLDNLLAQIGDQYADLFLAAKNLSDAILLSDILRVNTEITKAPLSASMIKRYDEHHQDLTLLKALVRQQLPEKYKEIFFDQSKNGYAGYIDGGASQEEFYKFIKPILEKMDGTEELLVKLNREDLLRKQRTFDNGSIPHQIHLGELHAILRRQEDFYPFLKDNREKIEKILTFRIPYYVGPLARGNSRFAWMTRKSEETITPWNFEEVVDKGASAQSFIERMTNFDKNLPNEKVLPKHSLLYEYFTVYNELTKVKYVTEGMRKPAFLSGEQKKAIVDLLFKTNRKVTVKQLKEDYFKKIECFDSVEISGVEDRFNASLGTYHDLLKIIKDKDFLDNEENEDILEDIVLTLTLFEDREMIEERLKTYAHLFDDKVMKQLKRRRYTGWGRLSRKLINGIRDKQSGKTILDFLKSDGFANRNFMQLIHDDSLTFKEDIQKAQVSGQGDSLHEHIANLAGSPAIKKGILQTVKVVDELVKVMGRHKPENIVIEMARENQTTQKGQKNSRERMKRIEEGIKELGSQILKEHPVENTQLQNEKLYLYYLQNGRDMYVDQELDINRLSDYDVDAIVPQSFLKDDSIDNKVLTRSDKNRGKSDNVPSEEVVKKMKNYWRQLLNAKLITQRKFDNLTKAERGGLSELDKAGFIKRQLVETRQITKHVAQILDSRMNTKYDENDKLIREVKVITLKSKLVSDFRKDFQFYKVREINNYHHAHDAYLNAVVGTALIKKYPKLESEFVYGDYKVYDVRKMIAKSEQEIGKATAKYFFYSNIMNFFKTEITLANGEIRKRPLIETNGETGEIVWDKGRDFATVRKVLSMPQVNIVKKTEVQTGGFSKESILPKRNSDKLIARKKDWDPKKYGGFDSPTVAYSVLVVAKVEKGKSKKLKSVKELLGITIMERSSFEKNPIDFLEAKGYKEVKKDLIIKLPKYSLFELENGRKRMLASAGELQKGNELALPSKYVNFLYLASHYEKLKGSPEDNEQKQLFVEQHKHYLDEIIEQISEFSKRVILADANLDKVLSAYNKHRDKPIREQAENIIHLFTLTNLGAPAAFKYFDTTIDRKRYTSTKEVLDATLIHQSITGLYETRIDLSQLGGD

SEQ ID NO: 1603 - DNA, 76 bp, synthetic construct
  source 1..76: mol_type = other DNA; note = Description of Artificial Sequence: Synthetic oligonucleotide
gttttagagctagaaatagcaagttaaaataaggctagtccgttatcaacttgaaaaagtgggaccgagtcggtcc

SEQ ID NO: 1604 - RNA, 47 nt, synthetic construct
  source 1..47: mol_type = other RNA; note = Description of Artificial Sequence: Synthetic oligonucleotide
gggaaataagagagaaaagaagagtaagaagaaatataagagccacc

SEQ ID NO: 1605 - RNA, 110 nt, synthetic construct
  source 1..110: mol_type = other RNA; note = Description of Artificial Sequence: Synthetic polynucleotide
tgataataggctggagcctcggtggccatgcttcttgccccttgggcctccccccagcccctcctccccttcctgcacccgtacccccgtggtctttgaataaagtctga

SEQ ID NO: 1606 - DNA, 62 bp, synthetic construct
  source 1..62: mol_type = other DNA; note = Description of Artificial Sequence: Synthetic oligonucleotide
cactcctccccatcctctccctctgtccctctgtccctctgaccctgcactgtcccagcacc

SEQ ID NO: 1607 - DNA, 122 bp, synthetic construct
  source 1..122: mol_type = other DNA; note = Description of Artificial Sequence: Synthetic polynucleotide
caggacacagccttggatcaggacagagacttgggggccatcctgcccctccaacccgacatgtgtacctcagctttttccctcacttgcatcaataaagcttctgtgtttggaacagctaa

SEQ ID NO: 1608 - RNA, 47 nt, synthetic construct; identical to SEQ ID NO: 1604
  source 1..47: mol_type = other RNA; note = Description of Artificial Sequence: Synthetic oligonucleotide

SEQ ID NO: 1609 - RNA, 110 nt, synthetic construct; identical to SEQ ID NO: 1605
  source 1..110: mol_type = other RNA; note = Description of Artificial Sequence: Synthetic polynucleotide

SEQ ID NO: 1610 - RNA, 47 nt, synthetic construct; identical to SEQ ID NO: 1604
  source 1..47: mol_type = other RNA; note = Description of Artificial Sequence: Synthetic oligonucleotide

SEQ ID NO: 1611 - RNA, 110 nt, synthetic construct; identical to SEQ ID NO: 1605
  source 1..110: mol_type = other RNA; note = Description of Artificial Sequence: Synthetic polynucleotide

SEQ ID NO: 1612 - DNA, 306 bp, synthetic construct
  source 1..306: mol_type = other DNA; note = Description of Artificial Sequence: Synthetic polynucleotide
tgcctgtcatacgaaaccgagatactgacagtagaatatggccttctgccaatcgggaagattgtggagaaacggatagaatgcacagtttactctgtcgataacaatggtaacatttatactcagccagttgcccagtggcacgaccggggagagcaggaagtattcgaatactgtctggaggatggaagtctcattagggccactaaggaccacaaatttatgacagtcgatggccagatgctgcctatagacgaaatctttgagcgagagttggacctcatgcgagttgacaaccttcctaat

SEQ ID NO: 1613 - protein, 102 aa, synthetic construct
  source 1..102: note = Description of Artificial Sequence: Synthetic polypeptide
CLSYETEILTVEYGLLPIGKIVEKRIECTVYSVDNNGNIYTQPVAQWHDRGEQEVFEYCLEDGSLIRATKDHKFMTVDGQMLPIDEIFERELDLMRVDNLPN

SEQ ID NO: 1614 - DNA, 108 bp, synthetic construct
  source 1..108: mol_type = other DNA; note = Description of Artificial Sequence: Synthetic polynucleotide
atgatcaagatagctacaaggaagtatcttggcaaacaaaacgtttatgatattggagtcgaaagagatcacaactttgctctgaagaacggattcatagcttctaat

SEQ ID NO: 1615 - protein, 36 aa, synthetic construct
  source 1..36: note = Description of Artificial Sequence: Synthetic polypeptide
MIKIATRKYLGKQNVYDIGVERDHNFALKNGFIASN

SEQ ID NO: 1616 - DNA, 303 bp, synthetic construct
  source 1..303: mol_type = other DNA; note = Description of Artificial Sequence: Synthetic polynucleotide
tgcctgtcttatgataccgagatacttaccgttgaatatggcttcttgcctattggaaagattgtcgaagagagaattgaatgcacagtatatactgtagacaagaatggtttcgtttacacacagcccattgctcaatggcacaatcgcggcgaacaagaagtatttgagtactgtctcgaggatggaagcatcatacgagcaactaaagatcataaattcatgaccactgacgggcagatgttgccaatagatgagatattcgagcggggcttggatctcaaacaagtggatggattgcca

SEQ ID NO: 1617 - protein, 101 aa, synthetic construct
  source 1..101: note = Description of Artificial Sequence: Synthetic polypeptide
CLSYDTEILTVEYGFLPIGKIVEERIECTVYTVDKNGFVYTQPIAQWHNRGEQEVFEYCLEDGSIIRATKDHKFMTTDGQMLPIDEIFERGLDLKQVDGLP

SEQ ID NO: 1618 - DNA, 159 bp, synthetic construct
  source 1..159: mol_type = other DNA; note = Description of Artificial Sequence: Synthetic polynucleotide
atgaagaggactgccgatggatcagagtttgaatctcccaagaagaagaggaaagtaaagataatatctcgaaaaagtcttggtacccaaaatgtctatgatattggagtggagaaagatcacaacttccttctcaagaacggtctcgtagccagcaac

SEQ ID NO: 1619 - protein, 53 aa, synthetic construct
  source 1..53: note = Description of Artificial Sequence: Synthetic polypeptide
MKRTADGSEFESPKKKRKVKIISRKSLGTQNVYDIGVEKDHNFLLKNGLVASN

SEQ ID NO: 1620 - DNA, 26 bp, Homo sapiens
  source 1..26: mol_type = unassigned DNA
ctgacccttctctctctcccccagag

SEQ ID NO: 1621 - DNA, 15 bp, Homo sapiens
  source 1..15: mol_type = unassigned DNA
tttctctcccacaag

SEQ ID NO: 1622 - DNA, 12 bp, Homo sapiens
  source 1..12: mol_type = unassigned DNA
ctggggctgggg

SEQ ID NO: 1623 - DNA, 12 bp, unidentified
  source 1..12: mol_type = unassigned DNA; note = Description of Unknown: Myoclonic epilepsy of Unverricht and Lundborg repeat sequence
ccccgccccgcg

SEQ ID NO: 1624 - DNA, 133 bp, synthetic construct
  source 1..133: mol_type = other DNA; note = Description of Artificial Sequence: Synthetic polynucleotide
tcccctccaggccgtgcatagttttagagctagaaatagcaagttaaaataaggctagtccgttatcaacttgaaaaagtgggaccgagtcggtcctcgtcgatggtcagcacagccttatgcacggcctgga

SEQ ID NO: 1625 - DNA, 20 bp, synthetic construct
  source 1..20: mol_type = other DNA; note = Description of Artificial Sequence: Synthetic oligonucleotide
tttgttgaacttgacctcgg

SEQ ID NO: 1626 - DNA, 118 bp, synthetic construct
  source 1..118: mol_type = other DNA; note = Description of Artificial Sequence: Synthetic polynucleotide
accattaaagaaaatatcatgttttagagctagaaatagcaagttaaaataaggctagtccgttatcaacttgaaaaagtgggaccgagtcggtccaccaaagatgatattttcttta

SEQ ID NO: 1627 - DNA, 20 bp, synthetic construct
  source 1..20: mol_type = other DNA; note = Description of Artificial Sequence: Synthetic oligonucleotide
aaagatgatattttctttaa

SEQ ID NO: 1628 - DNA, 118 bp, synthetic construct
  source 1..118: mol_type = other DNA; note = Description of Artificial Sequence: Synthetic polynucleotide
gtaacggcagacttctccacgttttagagctagaaatagcaagttaaaataaggctagtccgttatcaacttgaaaaagtgggaccgagtcggtccgactcctgaggagaagtctgcc

SEQ ID NO: 1629 - DNA, 20 bp, synthetic construct
  source 1..20: mol_type = other DNA; note = Description of Artificial Sequence: Synthetic oligonucleotide
tggtgaggccctgggcaggt

SEQ ID NO: 1630 - DNA, 118 bp, synthetic construct
  source 1..118: mol_type = other DNA; note = Description of Artificial Sequence: Synthetic polynucleotide
ttggtgactgccacgcccaagttttagagctagaaatagcaagttaaaataaggctagtccgttatcaacttgaaaaagtgggaccgagtcggtccacaccccttgggcgtggcagtc

SEQ ID NO: 1631 - DNA, 20 bp, synthetic construct
  source 1..20: mol_type = other DNA; note = Description of Artificial Sequence: Synthetic oligonucleotide
ggccagcagtgaacacccct

SEQ ID NO: 1632 - DNA, 118 bp, synthetic construct
  source 1..118: mol_type = other DNA; note = Description of Artificial Sequence: Synthetic polynucleotide
actcaggaacactgctggttgttttagagctagaaatagcaagttaaaataaggctagtccgttatcaacttgaaaaagtgggaccgagtcggtccttcactgaaccagcagtgttcc

SEQ ID NO: 1633 - DNA, 20 bp, synthetic construct
  source 1..20: mol_type = other DNA; note = Description of Artificial Sequence: Synthetic oligonucleotide
ttggttgaaaatgattttgt

SEQ ID NO: 1634 - DNA, 129 bp, synthetic construct
  source 1..129: mol_type = other DNA; note = Description of Artificial Sequence: Synthetic polynucleotide
ccagggaaaacgcacccacggttttagagctagaaatagcaagttaaaataaggctagtccgttatcaacttgaaaaagtgggaccgagtcggtcctcccagcggtaggtgccccgtgggtgcgttttc

SEQ ID NO: 1635 - DNA, 20 bp, synthetic construct
  source 1..20: mol_type = other DNA; note = Description of Artificial Sequence: Synthetic oligonucleotide
ctccttctttgcgctcccag

SEQ ID NO: 1636 - DNA, 118 bp, synthetic construct
  source 1..118: mol_type = other DNA; note = Description of Artificial Sequence: Synthetic polynucleotide
gccctccccttctctgcccagttttagagctagaaatagcaagttaaaataaggctagtccgttatcaacttgaaaaagtgggaccgagtcggtccggtactgtgggcagagaagggg

SEQ ID NO: 1637 - DNA, 20 bp, synthetic construct
  source 1..20: mol_type = other DNA; note = Description of Artificial Sequence: Synthetic oligonucleotide
tcaggcaacgccaggtactg

SEQ ID NO: 1638 - DNA, 188 bp, synthetic construct
  source 1..188: mol_type = other DNA; note = Description of Artificial Sequence: Synthetic polynucleotide
ctcgaagggtccttgtagccgttttagagctagaaatagcaagttaaaataaggctagtccgttatcaacttgaaaaagtgggaccgagtcggtccgtgatccccccagcagcagcagcagcagcagcagcagcagcagcagcagcagcagcagcagcagcagcagcattcccggctacaaggaccct

SEQ ID NO: 1639 - DNA, 20 bp, synthetic construct
  source 1..20: mol_type = other DNA; note = Description of Artificial Sequence: Synthetic oligonucleotide
atcacaggactggagctggg

SEQ ID NO: 1640 - DNA, 252 bp, synthetic construct
  source 1..252: mol_type = other DNA; note = Description of Artificial Sequence: Synthetic polynucleotide
accactgcactccagcctaggttttagagctagaaatagcaagttaaaataaggctagtccgttatcaacttgaaaaagtgggaccgagtcggtccgtgtctgtctgtctgtctgtctgtctgtctgtctgtctgtctgcctgcctgcctgcctgcctgcctgcctgcctggctgcctgtctgcctgtctgcctgcctgcctgcctgcctgcctgcctgtctgtctcactttgtcccctaggctggagtgca

SEQ ID NO: 1641 - DNA, 20 bp, synthetic construct
  source 1..20: mol_type = other DNA; note = Description of Artificial Sequence: Synthetic oligonucleotide
gcctcagcctcctgagtagc

SEQ ID NO: 1642 - DNA, 188 bp, synthetic construct
  source 1..188: mol_type = other DNA; note = Description of Artificial Sequence: Synthetic polynucleotide
gggggcgtgcggcagcgcgggttttagagctagaaatagcaagttaaaataaggctagtccgttatcaacttgaaaaagtgggaccgagtcggtcctgcgggcgctcgaggcccagccgccgccgccgccgccgccgccgccgcctccgccgccgccgccgccgccgccgccgccgcgctgccgcacg

SEQ ID NO: 1643 - DNA, 20 bp, synthetic construct
  source 1..20: mol_type = other DNA; note = Description of Artificial Sequence: Synthetic oligonucleotide
gctcagaggcggccctccac

SEQ ID NO: 1644 - DNA, 188 bp, synthetic construct
  source 1..188: mol_type = other DNA; note = Description of Artificial Sequence: Synthetic polynucleotide
caggcgcgcgacaccacgccgttttagagctagaaatagcaagttaaaataaggctagtccgttatcaacttgaaaaagtgggaccgagtcggtccaacccagtatctactaaaaaatacaaaaaaaaaaaaaaaagaagaagaagaagaagaaaataaagaaaagttagccgggcgtggtgtcgcgc

SEQ ID NO: 1645 - DNA, 20 bp, synthetic construct
  source 1..20: mol_type = other DNA; note = Description of Artificial Sequence: Synthetic oligonucleotide
cgcttgagcccgggaggcag

SEQ ID NO: 1646 - DNA, 221 bp, synthetic construct
  source 1..221: mol_type = other DNA; note = Description of Artificial Sequence: Synthetic polynucleotide
ggcggctgaggaagctgagggttttagagctagaaatagcaagttaaaataaggctagtccgttatcaacttgaaaaagtgggaccgagtcggtccagtccctcaagtccttccagcagcagcagcagcagcagcagcagcagcagcagcagcagcagcagcagcagcagcaacagccgccaccgccgccgccgccgccgccgcctcctcagcttcctcag

SEQ ID NO: 1647 - DNA, 20 bp, synthetic construct
  source 1..20: mol_type = other DNA; note = Description of Artificial Sequence: Synthetic oligonucleotide
cgctgcaccgaccgtgagtt

SEQ ID NO: 1648 - DNA, 214 bp, synthetic construct
  source 1..214: mol_type = other DNA; note = Description of Artificial Sequence: Synthetic polynucleotide
tgagccccggagccctgctggttttagagctagaaatagcaagttaaaataaggctagtccgttatcaacttgaaaaagtgggaccgagtcggtccacaaggctgagcagcagcagcagcagcagcagcagcagcagcagcagcatcagcatcagcagcagcagcagcagcagcagcagcagcagcagcagcagcacctcagcagggctccggg

SEQ ID NO: 1649 - DNA, 20 bp, synthetic construct
  source 1..20: mol_type = other DNA; note = Description of Artificial Sequence: Synthetic oligonucleotide
tccagttctccgcagaacac

SEQ ID NO: 1650 - protein, 1288 aa, synthetic construct
  source 1..1288: note = Description of Artificial Sequence: Synthetic polypeptide
MASCPKPGPPVSAGAMSLESGLTTHSVLAIERGPNSLANSGSDFGGGGLGLPLRLLRVSVGTQTSRSDWVDLVSWSHPGPTSKSQQVDLVSLFPKHRVDLLSKNDQVDLVAQFLPSKFPPNLAENDLALLVNLEFYRSDLHVYECVHFAAHWEGLSGLPEVYEQLAPQPCVGETLHSSLPRDSELFVPEEGSSEKESEDAPKTSPPTPGKHGLEQTGEEKVMVTVPDKNPPCPCCGTRVNSVLNLIEHLKVSHGKRGVCFRCAKCGKENSNYHSVVCHFPKCRGPETEKAPAGEWICEVCNRDFTTKIGLGQHKRLAHPAVRNQERIVASQPKETSNRGAHKRCWTKEEEELLIRLEAQFEGNKNINKLIAEHITTKTAKQISDKRRLLSRKPAEEPREEPGTCHHTRRAAGGGSCFGCLESISQIRTATRDKKDTVTREKHPKKPFQKWMKDRAIKKGNYLRFQRLFYLDRGKLAKIILDDIECLSCDIPLSEIYSVFKTRWETTGSFKSLGDFKTYGKADNTAFRELITAKEIEKNVQEMSKGSAPGPDGITLGDVVKMDPEFSRTMEIFNLWLTTGKIPDMVRGCRTVLIPKSSKPDRLKDINNWRPITIGSILLRLFSRIVTARLSKACPLNPRQRGFIRAAGCSENLKLLQTIIWSAKREHRPLGVVFVDIAKAFDTVSHQHIIHALQQREVDPHIVGLVSNMYENISTYITTKRNTHTDKIQIRVGVKQGDPMSPLLFNLAMDPLLCKLEESGKGYHRGQSSITAMAFADDLVLLSDSWENMNTNISILETFCNLTGLKTQGQKCHGFYIKPTKDSYTINDCAAWTINGTPLNMIDPGESEKYLGLQFDPWIGIARSGLSTKLDFWLQRIDQAPLKPLQKTDILKTYTIPRLIYIADHSEVKTALLETLDQKIRTAVKEWLHLPPCTCDAILYSSTRDGGLGITKLAGLIPSVQARRLHRIAQSSDDTMKCFMEKEKMEQLHKKLWIQAGGDRENIPSIWEAPPSSEPPNNVSTNSEWEAPTQKDKFPKPCNWRKNEFKKWTKLASQGRGIVNFERDKISNHWIQYYRRIPHRKLLTALQLRANVYPTREFLARGRQDQYIKACRHCDADIESCAHIIGNCPVTQDARIKRHNYICELLLEEAKKKDWVVFKEPHIRDSNKELYKPDLIFVKDARALVVDVTVRYEAAKSSLEEAAAEKVRKYKHLETEVRHLTNAKDVTFVGFPLGARGKWHQDNFKLLTELGLSKSRQVKMAETFSTVALFSSVDIVHMFASRARKSMVM

SEQ ID NO: 1651 - protein, 1276 aa, synthetic construct
  source 1..1276: note = Description of Artificial Sequence: Synthetic polypeptide
MASCPKPGPPVSAGAMSLESGLTTHSVLAIERGPNSLANSGSDFGGGGLGLPLRLLRVSVGTQTSRSDWVDLVSWSHPGPTSKSQQVDLVSLFPKHRVDLLSKNDQVDLVAQFLPSKFPPNLAENDLALLVNLEFYRSDLHVYECVHFAAHWEGLSGLPEVYEQLAPQPCVGETLHSSLPRDSELFVPEEGSSEKESEDAPKTSPPTPGKHGLEQTGEEKVMVTVPDKNPPCPCCGTRVNSVLNLIEHLKVSHGKRGVCFRCAKCGKENSNYHSVVCHFPKCRGPETEKAPAGEWICEVCNRDFTTKIGLGQHKRLAHPAVRNQERIVASQPKETSNRGAHKRCWTKEEEELLIRLEAQFEGNKNINKLIAEHITTKTAKQISDKRRLLSRKPAEEPREEPGTCHHTRRAAGGGSTATRDKKDTVTREKHPKKPFQKWMKDRAIKKGNYLRFQRLFYLDRGKLAKIILDDIECLSCDIPLSEIYSVFKTRWETTGSFKSLGDFKTYGKADNTAFRELITAKEIEKNVQEMSKGSAPGPDGITLGDVVKMDPEFSRTMEIFNLWLTTGKIPDMVRGCRTVLIPKSSKPDRLKDINNWRPITIGSILLRLFSRIVTARLSKACPLNPRQRGFIRAAGCSENLKLLQTIIWSAKREHRPLGVVFVDIAKAFDTVSHQHIIHALQQREVDPHIVGLVSNMYENISTYITTKRNTHTDKIQIRVGVKQGDPMSPLLFNLAMDPLLCKLEESGKGYHRGQSSITAMAFADDLVLLSDSWENMNTNISILETFCNLTGLKTQGQKCHGFYIKPTKDSYTINDCAAWTINGTPLNMIDPGESEKYLGLQFDPWIGIARSGLSTKLDFWLQRIDQAPLKPLQKTDILKTYTIPRLIYIADHSEVKTALLETLDQKIRTAVKEWLHLPPCTCDAILYSSTRDGGLGITKLAGLIPSVQARRLHRIAQSSDDTMKCFMEKEKMEQLHKKLWIQAGGDRENIPSIWEAPPSSEPPNNVSTNSEWEAPTQKDKFPKPCNWRKNEFKKWTKLASQGRGIVNFERDKISNHWIQYYRRIPHRKLLTALQLRANVYPTREFLARGRQDQYIKACRHCDADIESCAHIIGNCPVTQDARIKRHNYICELLLEEAKKKDWVVFKEPHIRDSNKELYKPDLIFVKDARALVVDVTVRYEAAKSSLEEAAAEKVRKYKHLETEVRHLTNAKDVTFVGFPLGARGKWHQDNFKLLTELGLSKSRQVKMAETFSTVALFSSVDIVHMFASRARKSMVM

SEQ ID NO: 1652 - protein, 1300 aa, synthetic construct
  source 1..1300: note = Description of Artificial Sequence: Synthetic polypeptide
MASCPKPGPPVSAGAMSLESGLTTHSVLAIERGPNSLANSGSDFGGGGLGLPLRLLRVSVGTQTSRSDWVDLVSWSHPGPTSKSQQVDLVSLFPKHRVDLLSKNDQVDLVAQFLPSKFPPNLAENDLALLVNLEFYRSDLHVYECVHFAAHWEGLSGLPEVYEQLAPQPCVGETLHSSLPRDSELFVPEEGSSEKESEDAPKTSPPTPGKHGLEQTGEEKVMVTVPDKNPPCPCCGTRVNSVLNLIEHLKVSHGKRGVCFRCAKCGKENSNYHSVVCHFPKCRGPETEKAPAGEWICEVCNRDFTTKIGLGQHKRLAHPAVRNQERIVASQPKETSNRGAHKRCWTKEEEELLIRLEAQFEGNKNINKLIAEHITTKTAKQISDKRRLLSRKPAEEPREEPGTCHHTRRAASGSETPGTSESATPESCFGCLESISQIRTATRDKKDTVTREKHPKKPFQKWMKDRAIKKGNYLRFQRLFYLDRGKLAKIILDDIECLSCDIPLSEIYSVFKTRWETTGSFKSLGDFKTYGKADNTAFRELITAKEIEKNVQEMSKGSAPGPDGITLGDVVKMDPEFSRTMEIFNLWLTTGKIPDMVRGCRTVLIPKSSKPDRLKDINNWRPITIGSILLRLFSRIVTARLSKACPLNPRQRGFIRAAGCSENLKLLQTIIWSAKREHRPLGVVFVDIAKAFDTVSHQHIIHALQQREVDPHIVGLVSNMYENISTYITTKRNTHTDKIQIRVGVKQGDPMSPLLFNLAMDPLLCKLEESGKGYHRGQSSITAMAFADDLVLLSDSWENMNTNISILETFCNLTGLKTQGQKCHGFYIKPTKDSYTINDCAAWTINGTPLNMIDPGESEKYLGLQFDPWIGIARSGLSTKLDFWLQRIDQAPLKPLQKTDILKTYTIPRLIYIADHSEVKTALLETLDQKIRTAVKEWLHLPPCTCDAILYSSTRDGGLGITKLAGLIPSVQARRLHRIAQSSDDTMKCFMEKEKMEQLHKKLWIQAGGDRENIPSIWEAPPSSEPPNNVSTNSEWEAPTQKDKFPKPCNWRKNEFKKWTKLASQGRGIVNFERDKISNHWIQYYRRIPHRKLLTALQLRANVYPTREFLARGRQDQYIKACRHCDADIESCAHIIGNCPVTQDARIKRHNYICELLLEEAKKKDWVVFKEPHIRDSNKELYKPDLIFVKDARALVVDVTVRYEAAKSSLEEAAAEKVRKYKHLETEVRHLTNAKDVTFVGFPLGARGKWHQDNFKLLTELGLSKSRQVKMAETFSTVALFSSVDIVHMFASRARKSMVM

SEQ ID NO: 1653 - protein, 1288 aa, synthetic construct
  source 1..1288: note = Description of Artificial Sequence: Synthetic polypeptide
MASCPKPGPPVSAGAMSLESGLTTHSVLAIERGPNSLANSGSDFGGGGLGLPLRLLRVSVGTQTSRSDWVDLVSWSHPGPTSKSQQVDLVSLFPKHRVDLLSKNDQVDLVAQFLPSKFPPNLAENDLALLVNLEFYRSDLHVYECVHFAAHWEGLSGLPEVYEQLAPQPCVGETLHSSLPRDSELFVPEEGSSEKESEDAPKTSPPTPGKHGLEQTGEEKVMVTVPDKNPPCPCCGTRVNSVLNLIEHLKVSHGKRGVCFRCAKCGKENSNYHSVVCHFPKCRGPETEKAPAGEWICEVCNRDFTTKIGLGQHKRLAHPAVRNQERIVASQPKETSNRGAHKRCWTKEEEELLIRLEAQFEGNKNINKLIAEHITTKTAKQISDKRRLLSRKPAEEPREEPGTCHHTRRAASGSETPGTSESATPESTATRDKKDTVTREKHPKKPFQKWMKDRAIKKGNYLRFQRLFYLDRGKLAKIILDDIECLSCDIPLSEIYSVFKTRWETTGSFKSLGDFKTYGKADNTAFRELITAKEIEKNVQEMSKGSAPGPDGITLGDVVKMDPEFSRTMEIFNLWLTTGKIPDMVRGCRTVLIPKSSKPDRLKDINNWRPITIGSILLRLFSRIVTARLSKACPLNPRQRGFIRAAGCSENLKLLQTIIWSAKREHRPLGVVFVDIAKAFDTVSHQHIIHALQQREVDPHIVGLVSNMYENISTYITTKRNTHTDKIQIRVGVKQGDPMSPLLFNLAMDPLLCKLEESGKGYHRGQSSITAMAFADDLVLLSDSWENMNTNISILETFCNLTGLKTQGQKCHGFYIKPTKDSYTINDCAAWTINGTPLNMIDPGESEKYLGLQFDPWIGIARSGLSTKLDFWLQRIDQAPLKPLQKTDILKTYTIPRLIYIADHSEVKTALLETLDQKIRTAVKEWLHLPPCTCDAILYSSTRDGGLGITKLAGLIPSVQARRLHRIAQSSDDTMKCFMEKEKMEQLHKKLWIQAGGDRENIPSIWEAPPSSEPPNNVSTNSEWEAPTQKDKFPKPCNWRKNEFKKWTKLASQGRGIVNFERDKISNHWIQYYRRIPHRKLLTALQLRANVYPTREFLARGRQDQYIKACRHCDADIESCAHIIGNCPVTQDARIKRHNYICELLLEEAKKKDWVVFKEPHIRDSNKELYKPDLIFVKDARALVVDVTVRYEAAKSSLEEAAAEKVRKYKHLETEVRHLTNAKDVTFVGFPLGARGKWHQDNFKLLTELGLSKSRQVKMAETFSTVALFSSVDIVHMFASRARKSMVM

SEQ ID NO: 1654 - protein, 1265 aa, synthetic construct
  source 1..1265: note = Description of Artificial Sequence: Synthetic polypeptide
MASCPKPGPPVSAGAMSLESGLTTHSVLAIERGPNSLANSGSDFGGGGLGLPLRLLRVSVGTQTSRSDWVDLVSWSHPGPTSKSQQVDLVSLFPKHRVDLLSKNDQVDLVAQFLPSKFPPNLAENDLALLVNLEFYRSDLHVYECVHFAAHWEGLSGLPEVYEQLAPQPCVGETLHSSLPRDSELFVPEEGSSEKESEDAPKTSPPTPGKHGLEQTGEEKVMVTVPDKNPPCPCCGTRVNSVLNLIEHLKVSHGKRGVCFRCAKCGKENSNYHSVVCHFPKCRGPETEKAPAGEWICEVCNRDFTTKIGLGQHKRLAHPAVRNQERIVASQPKETSNRGAHKRCWTKEEEELLIRLEAQFEGNKNINKLIAEHITTKTAKQISDKRRLGGGSCFGCLESISQIRTATRDKKDTVTREKHPKKPFQKWMKDRAIKKGNYLRFQRLFYLDRGKLAKIILDDIECLSCDIPLSEIYSVFKTRWETTGSFKSLGDFKTYGKADNTAFRELITAKEIEKNVQEMSKGSAPGPDGITLGDVVKMDPEFSRTMEIFNLWLTTGKIPDMVRGCRTVLIPKSSKPDRLKDINNWRPITIGSILLRLFSRIVTARLSKACPLNPRQRGFIRAAGCSENLKLLQTIIWSAKREHRPLGVVFVDIAKAFDTVSHQHIIHALQQREVDPHIVGLVSNMYENISTYITTKRNTHTDKIQIRVGVKQGDPMSPLLFNLAMDPLLCKLEESGKGYHRGQSSITAMAFADDLVLLSDSWENMNTNISILETFCNLTGLKTQGQKCHGFYIKPTKDSYTINDCAAWTINGTPLNMIDPGESEKYLGLQFDPWIGIARSGLSTKLDFWLQRIDQAPLKPLQKTDILKTYTIPRLIYIADHSEVKTALLETLDQKIRTAVKEWLHLPPCTCDAILYSSTRDGGLGITKLAGLIPSVQARRLHRIAQSSDDTMKCFMEKEKMEQLHKKLWIQAGGDRENIPSIWEAPPSSEPPNNVSTNSEWEAPTQKDKFPKPCNWRKNEFKKWTKLASQGRGIVNFERDKISNHWIQYYRRIPHRKLLTALQLRANVYPTREFLARGRQDQYIKACRHCDADIESCAHIIGNCPVTQDARIKRHNYICELLLEEAKKKDWVVFKEPHIRDSNKELYKPDLIFVKDARALVVDVTVRYEAAKSSLEEAAAEKVRKYKHLETEVRHLTNAKDVTFVGFPLGARGKWHQDNFKLLTELGLSKSRQVKMAETFSTVALFSSVDIVHMFASRARKSMVM

SEQ ID NO: 1655 - protein, 1253 aa, synthetic construct
  source 1..1253: note = Description of Artificial Sequence: Synthetic polypeptide
MASCPKPGPPVSAGAMSLESGLTTHSVLAIERGPNSLANSGSDFGGGGLGLPLRLLRVSVGTQTSRSDWVDLVSWSHPGPTSKSQQVDLVSLFPKHRVDLLSKNDQVDLVAQFLPSKFPPNLAENDLALLVNLEFYRSDLHVYECVHFAAHWEGLSGLPEVYEQLAPQPCVGETLHSSLPRDSELFVPEEGSSEKESEDAPKTSPPTPGKHGLEQTGEEKVMVTVPDKNPPCPCCGTRVNSVLNLIEHLKVSHGKRGVCFRCAKCGKENSNYHSVVCHFPKCRGPETEKAPAGEWICEVCNRDFTTKIGLGQHKRLAHPAVRNQERIVASQPKETSNRGAHKRCWTKEEEELLIRLEAQFEGNKNINKLIAEHITTKTAKQISDKRRLGGGSTATRDKKDTVTREKHPKKPFQKWMKDRAIKKGNYLRFQRLFYLDRGKLAKIILDDIECLSCDIPLSEIYSVFKTRWETTGSFKSLGDFKTYGKADNTAFRELITAKEIEKNVQEMSKGSAPGPDGITLGDVVKMDPEFSRTMEIFNLWLTTGKIPDMVRGCRTVLIPKSSKPDRLKDINNWRPITIGSILLRLFSRIVTARLSKACPLNPRQRGFIRAAGCSENLKLLQTIIWSAKREHRPLGVVFVDIAKAFDTVSHQHIIHALQQREVDPHIVGLVSNMYENISTYITTKRNTHTDKIQIRVGVKQGDPMSPLLFNLAMDPLLCKLEESGKGYHRGQSSITAMAFADDLVLLSDSWENMNTNISILETFCNLTGLKTQGQKCHGFYIKPTKDSYTINDCAAWTINGTPLNMIDPGESEKYLGLQFDPWIGIARSGLSTKLDFWLQRIDQAPLKPLQKTDILKTYTIPRLIYIADHSEVKTALLETLDQKIRTAVKEWLHLPPCTCDAILYSSTRDGGLGITKLAGLIPSVQARRLHRIAQSSDDTMKCFMEKEKMEQLHKKLWIQAGGDRENIPSIWEAPPSSEPPNNVSTNSEWEAPTQKDKFPKPCNWRKNEFKKWTKLASQGRGIVNFERDKISNHWIQYYRRIPHRKLLTALQLRANVYPTREFLARGRQDQYIKACRHCDADIESCAHIIGNCPVTQDARIKRHNYICELLLEEAKKKDWVVFKEPHIRDSNKELYKPDLIFVKDARALVVDVTVRYEAAKSSLEEAAAEKVRKYKHLETEVRHLTNAKDVTFVGFPLGARGKWHQDNFKLLTELGLSKSRQVKMAETFSTVALFSSVDIVHMFASRARKSMVM

SEQ ID NO: 1656 - protein, 1277 aa, synthetic construct
  source 1..1277: note = Description of Artificial Sequence: Synthetic polypeptide
MASCPKPGPPVSAGAMSLESGLTTHSVLAIERGPNSLANSGSDFGGGGLGLPLRLLRVSVGTQTSRSDWVDLVSWSHPGPTSKSQQVDLVSLFPKHRVDLLSKNDQVDLVAQFLPSKFPPNLAENDLALLVNLEFYRSDLHVYECVHFAAHWEGLSGLPEVYEQLAPQPCVGETLHSSLPRDSELFVPEEGSSEKESEDAPKTSPPTPGKHGLEQTGEEKVMVTVPDKNPPCPCCGTRVNSVLNLIEHLKVSHGKRGVCFRCAKCGKENSNYHSVVCHFPKCRGPETEKAPAGEWICEVCNRDFTTKIGLGQHKRLAHPAVRNQERIVASQPKETSNRGAHKRCWTKEEEELLIRLEAQFEGNKNINKLIAEHITTKTAKQISDKRRLSGSETPGTSESATPESCFGCLESISQIRTATRDKKDTVTREKHPKKPFQKWMKDRAIKKGNYLRFQRLFYLDRGKLAKIILDDIECLSCDIPLSEIYSVFKTRWETTGSFKSLGDFKTYGKADNTAFRELITAKEIEKNVQEMSKGSAPGPDGITLGDVVKMDPEFSRTMEIFNLWLTTGKIPDMVRGCRTVLIPKSSKPDRLKDINNWRPITIGSILLRLFSRIVTARLSKACPLNPRQRGFIRAAGCSENLKLLQTIIWSAKREHRPLGVVFVDIAKAFDTVSHQHIIHALQQREVDPHIVGLVSNMYENISTYITTKRNTHTDKIQIRVGVKQGDPMSPLLFNLAMDPLLCKLEESGKGYHRGQSSITAMAFADDLVLLSDSWENMNTNISILETFCNLTGLKTQGQKCHGFYIKPTKDSYTINDCAAWTINGTPLNMIDPGESEKYLGLQFDPWIGIARSGLSTKLDFWLQRIDQAPLKPLQKTDILKTYTIPRLIYIADHSEVKTALLETLDQKIRTAVKEWLHLPPCTCDAILYSSTRDGGLGITKLAGLIPSVQARRLHRIAQSSDDTMKCFMEKEKMEQLHKKLWIQAGGDRENIPSIWEAPPSSEPPNNVSTNSEWEAPTQKDKFPKPCNWRKNEFKKWTKLASQGRGIVNFERDKISNHWIQYYRRIPHRKLLTALQLRANVYPTREFLARGRQDQYIKACRHCDADIESCAHIIGNCPVTQDARIKRHNYICELLLEEAKKKDWVVFKEPHIRDSNKELYKPDLIFVKDARALVVDVTVRYEAAKSSLEEAAAEKVRKYKHLETEVRHLTNAKDVTFVGFPLGARGKWHQDNFKLLTELGLSKSRQVKMAETFSTVALFSSVDIVHMFASRARKSMVM

SEQ ID NO: 1657 - protein, 1265 aa, synthetic construct
  source 1..1265: note = Description of Artificial Sequence: Synthetic polypeptide
MASCPKPGPPVSAGAMSLESGLTTHSVLAIERGPNSLANSGSDFGGGGLGLPLRLLRVSVGTQTSRSDWVDLVSWSHPGPTSKSQQVDLVSLFPKHRVDLLSKNDQVDLVAQFLPSKFPPNLAENDLALLVNLEFYRSDLHVYECVHFAAHWEGLSGLPEVYEQLAPQPCVGETLHSSLPRDSELFVPEEGSSEKESEDAPKTSPPTPGKHGLEQTGEEKVMVTVPDKNPPCPCCGTRVNSVLNLIEHLKVSHGKRGVCFRCAKCGKENSNYHSVVCHFPKCRGPETEKAPAGEWICEVCNRDFTTKIGLGQHKRLAHPAVRNQERIVASQPKETSNRGAHKRCWTKEEEELLIRLEAQFEGNKNINKLIAEHITTKTAKQISDKRRLSGSETPGTSESATPESTATRDKKDTVTREKHPKKPFQKWMKDRAIKKGNYLRFQRLFYLDRGKLAKIILDDIECLSCDIPLSEIYSVFKTRWETTGSFKSLGDFKTYGKADNTAFRELITAKEIEKNVQEMSKGSAPGPDGITLGDVVKMDPEFSRTMEIFNLWLTTGKIPDMVRGCRTVLIPKSSKPDRLKDINNWRPITIGSILLRLFSRIVTARLSKACPLNPRQRGFIRAAGCSENLKLLQTIIWSAKREHRPLGVVFVDIAKAFDTVSHQHIIHALQQREVDPHIVGLVSNMYENISTYITTKRNTHTDKIQIRVGVKQGDPMSPLLFNLAMDPLLCKLEESGKGYHRGQSSITAMAFADDLVLLSDSWENMNTNISILETFCNLTGLKTQGQKCHGFYIKPTKDSYTINDCAAWTINGTPLNMIDPGESEKYLGLQFDPWIGIARSGLSTKLDFWLQRIDQAPLKPLQKTDILKTYTIPRLIYIADHSEVKTALLETLDQKIRTAVKEWLHLPPCTCDAILYSSTRDGGLGITKLAGLIPSVQARRLHRIAQSSDDTMKCFMEKEKMEQLHKKLWIQAGGDRENIPSIWEAPPSSEPPNNVSTNSEWEAPTQKDKFPKPCNWRKNEFKKWTKLASQGRGIVNFERDKISNHWIQYYRRIPHRKLLTALQLRANVYPTREFLARGRQDQYIKACRHCDADIESCAHIIGNCPVTQDARIKRHNYICELLLEEAKKKDWVVFKEPHIRDSNKELYKPDLIFVKDARALVVDVTVRYEAAKSSLEEAAAEKVRKYKHLETEVRHLTNAKDVTFVGFPLGARGKWHQDNFKLLTELGLSKSRQVKMAETFSTVALFSSVDIVHMFASRARKSMVM

SEQ ID NO: 1658 - DNA, 320 bp, unidentified
  source 1..320: mol_type = unassigned DNA; note = Description of Unknown: R2Tg landing pad sequence
gctcacacaggaaacagctatgaccatgattacgccaagctgttgacgcgatgtgatttctgcccagtgctctgaatgtcaaagtgaagaaattcaatgaagcgcgggtaaacggcgggagtaactatgactctcttaaggtagccaaatgcctcgtcatctaattagtgacgcgcatgaatggatgaacgagattcccactgtccctacctactatccagcgaaaccacagccaagggaaattcactggccgtcgttttacaacgtcgtgactgggaaaaccctggcgttacccaacttaatcgccttgcagcacatcc

SEQ ID NO: 1659 - DNA, 320 bp, synthetic construct
  source 1..320: mol_type = other DNA; note = Description of Artificial Sequence: Synthetic polynucleotide
gctcacacaggaaacagctatgaccatgattacgccaagctgttgacgcgatgtgatttctgcccagtgctctgaatgtcaaagtgaagaaattcaatgaagcgcgggtaaacggcgggagtaactatgactctctttccaatatgatttgcctcgtcatctaattagtgacgcgcatgaatggatgaacgagattcccactgtccctacctactatccagcgaaaccacagccaagggaaattcactggccgtcgttttacaacgtcgtgactgggaaaaccctggcgttacccaacttaatcgccttgcagcacatcc

SEQ ID NO: 1660 - DNA, 320 bp, synthetic construct
  source 1..320: mol_type = other DNA; note = Description of Artificial Sequence: Synthetic polynucleotide
gctcacacaggaaacagctatgaccatgattacgccaagctgttgacgcgatgtgatttctgcccagtgctctgaatgtcaaagtgaagaaattcaatgaagcgcgggtaaacggcgggagtaactatgactctctttccaatatgattccacccatggcaaattccatggcaccgtcaaggctgagaacgggaagcttgtcatcaatggaaactatccagcgaaaccacagccaagggaaattcactggccgtcgttttacaacgtcgtgactgggaaaaccctggcgttacccaacttaatcgccttgcagcacatcc

SEQ ID NO: 1661 - DNA, 13 bp, synthetic construct
  source 1..13: mol_type = other DNA; note = Description of Artificial Sequence: Synthetic oligonucleotide
taaggtagccaaa

SEQ ID NO: 1662 - protein, 991 aa, synthetic construct
  source 1..991: note = Description of Artificial Sequence: Synthetic polypeptide
MGIHGVPAAMAERPFQCRICMRNFSYNWHLQRHIRTHTGEKPFACDICGRKFARSDHLTTHTKIHTGSQKPFQCRICMRNFSHNYARDCHIRTHTGEKPFACDICGRKFAQNSTRIGHTKIHLRGSGGGSTATRDKKDTVTREKHPKKPFQKWMKDRAIKKGNYLRFQRLFYLDRGKLAKIILDDIECLSCDIPLSEIYSVFKTRWETTGSFKSLGDFKTYGKADNTAFRELITAKEIEKNVQEMSKGSAPGPDGITLGDVVKMDPEFSRTMEIFNLWLTTGKIPDMVRGCRTVLIPKSSKPDRLKDINNWRPITIGSILLRLFSRIVTARLSKACPLNPRQRGFIRAAGCSENLKLLQTIIWSAKREHRPLGVVFVDIAKAFDTVSHQHIIHALQQREVDPHIVGLVSNMYENISTYITTKRNTHTDKIQIRVGVKQGDPMSPLLFNLAMDPLLCKLEESGKGYHRGQSSITAMAFADDLVLLSDSWENMNTNISILETFCNLTGLKTQGQKCHGFYIKPTKDSYTINDCAAWTINGTPLNMIDPGESEKYLGLQFDPWIGIARSGLSTKLDFWLQRIDQAPLKPLQKTDILKTYTIPRLIYIADHSEVKTALLETLDQKIRTAVKEWLHLPPCTCDAILYSSTRDGGLGITKLAGLIPSVQARRLHRIAQSSDDTMKCFMEKEKMEQLHKKLWIQAGGDRENIPSIWEAPPSSEPPNNVSTNSEWEAPTQKDKFPKPCNWRKNEFKKWTKLASQGRGIVNFERDKISNHWIQYYRRIPHRKLLTALQLRANVYPTREFLARGRQDQYIKACRHCDADIESCAHIIGNCPVTQDARIKRHNYICELLLEEAKKKDWVVFKEPHIRDSNKELYKPDLIFVKDARALVVDVTVRYEAAKSSLEEAAAEKVRKYKHLETEVRHLTNAKDVTFVGFPLGARGKWHQDNFKLLTELGLSKSRQVKMAETFSTVALFSSVDIVHMFASRARKSMVM

SEQ ID NO: 1663 - protein, 1003 aa, synthetic construct
  source 1..1003: note = Description of Artificial Sequence: Synthetic polypeptide
MGIHGVPAAMAERPFQCRICMRNFSYNWHLQRHIRTHTGEKPFACDICGRKFARSDHLTTHTKIHTGSQKPFQCRICMRNFSHNYARDCHIRTHTGEKPFACDICGRKFAQNSTRIGHTKIHLRGSSGSETPGTSESATPESTATRDKKDTVTREKHPKKPFQKWMKDRAIKKGNYLRFQRLFYLDRGKLAKIILDDIECLSCDIPLSEIYSVFKTRWETTGSFKSLGDFKTYGKADNTAFRELITAKEIEKNVQEMSKGSAPGPDGITLGDVVKMDPEFSRTMEIFNLWLTTGKIPDMVRGCRTVLIPKSSKPDRLKDINNWRPITIGSILLRLFSRIVTARLSKACPLNPRQRGFIRAAGCSENLKLLQTIIWSAKREHRPLGVVFVDIAKAFDTVSHQHIIHALQQREVDPHIVGLVSNMYENISTYITTKRNTHTDKIQIRVGVKQGDPMSPLLFNLAMDPLLCKLEESGKGYHRGQSSITAMAFADDLVLLSDSWENMNTNISILETFCNLTGLKTQGQKCHGFYIKPTKDSYTINDCAAWTINGTPLNMIDPGESEKYLGLQFDPWIGIARSGLSTKLDFWLQRIDQAPLKPLQKTDILKTYTIPRLIYIADHSEVKTALLETLDQKIRTAVKEWLHLPPCTCDAILYSSTRDGGLGITKLAGLIPSVQARRLHRIAQSSDDTMKCFMEKEKMEQLHKKLWIQAGGDRENIPSIWEAPPSSEPPNNVSTNSEWEAPTQKDKFPKPCNWRKNEFKKWTKLASQGRGIVNFERDKISNHWIQYYRRIPHRKLLTALQLRANVYPTREFLARGRQDQYIKACRHCDADIESCAHIIGNCPVTQDARIKRHNYICELLLEEAKKKDWVVFKEPHIRDSNKELYKPDLIFVKDARALVVDVTVRYEAAKSSLEEAAAEKVRKYKHLETEVRHLTNAKDVTFVGFPLGARGKWHQDNFKLLTELGLSKSRQVKMAETFSTVALFSSVDIVHMFASRARKSMVM

SEQ ID NO: 1664 - protein, 1003 aa, synthetic construct
  source 1..1003: note = Description of Artificial Sequence: Synthetic polypeptide
MGIHGVPAAMAERPFQCRICMRNFSYNWHLQRHIRTHTGEKPFACDICGRKFARSDHLTTHTKIHTGSQKPFQCRICMRNFSHNYARDCHIRTHTGEKPFACDICGRKFAQNSTRIGHTKIHLRGSGGGSCFGCLESISQIRTATRDKKDTVTREKHPKKPFQKWMKDRAIKKGNYLRFQRLFYLDRGKLAKIILDDIECLSCDIPLSEIYSVFKTRWETTGSFKSLGDFKTYGKADNTAFRELITAKEIEKNVQEMSKGSAPGPDGITLGDVVKMDPEFSRTMEIFNLWLTTGKIPDMVRGCRTVLIPKSSKPDRLKDINNWRPITIGSILLRLFSRIVTARLSKACPLNPRQRGFIRAAGCSENLKLLQTIIWSAKREHRPLGVVFVDIAKAFDTVSHQHIIHALQQREVDPHIVGLVSNMYENISTYITTKRNTHTDKIQIRVGVKQGDPMSPLLFNLAMDPLLCKLEESGKGYHRGQSSITAMAFADDLVLLSDSWENMNTNISILETFCNLTGLKTQGQKCHGFYIKPTKDSYTINDCAAWTINGTPLNMIDPGESEKYLGLQFDPWIGIARSGLSTKLDFWLQRIDQAPLKPLQKTDILKTYTIPRLIYIADHSEVKTALLETLDQKIRTAVKEWLHLPPCTCDAILYSSTRDGGLGITKLAGLIPSVQARRLHRIAQSSDDTMKCFMEKEKMEQLHKKLWIQAGGDRENIPSIWEAPPSSEPPNNVSTNSEWEAPTQKDKFPKPCNWRKNEFKKWTKLASQGRGIVNFERDKISNHWIQYYRRIPHRKLLTALQLRANVYPTREFLARGRQDQYIKACRHCDADIESCAHIIGNCPVTQDARIKRHNYICELLLEEAKKKDWVVFKEPHIRDSNKELYKPDLIFVKDARALVVDVTVRYEAAKSSLEEAAAEKVRKYKHLETEVRHLTNAKDVTFVGFPLGARGKWHQDNFKLLTELGLSKSRQVKMAETFSTVALFSSVDIVHMFASRARKSMVM

SEQ ID NO: 1665 - protein, 1015 aa, synthetic construct
  source 1..1015: note = Description of Artificial Sequence: Synthetic polypeptide
MGIHGVPAAMAERPFQCRICMRNFSYNWHLQRHIRTHTGEKPFACDICGRKFARSDHLTTHTKIHTGSQKPFQCRICMRNFSHNYARDCHIRTHTGEKPFACDICGRKFAQNSTRIGHTKIHLRGSSGSETPGTSESATPESCFGCLESISQIRTATRDKKDTVTREKHPKKPFQKWMKDRAIKKGNYLRFQRLFYLDRGKLAKIILDDIECLSCDIPLSEIYSVFKTRWETTGSFKSLGDFKTYGKADNTAFRELITAKEIEKNVQEMSKGSAPGPDGITLGDVVKMDPEFSRTMEIFNLWLTTGKIPDMVRGCRTVLIPKSSKPDRLKDINNWRPITIGSILLRLFSRIVTARLSKACPLNPRQRGFIRAAGCSENLKLLQTIIWSAKREHRPLGVVFVDIAKAFDTVSHQHIIHALQQREVDPHIVGLVSNMYENISTYITTKRNTHTDKIQIRVGVKQGDPMSPLLFNLAMDPLLCKLEESGKGYHRGQSSITAMAFADDLVLLSDSWENMNTNISILETFCNLTGLKTQGQKCHGFYIKPTKDSYTINDCAAWTINGTPLNMIDPGESEKYLGLQFDPWIGIARSGLSTKLDFWLQRIDQAPLKPLQKTDILKTYTIPRLIYIADHSEVKTALLETLDQKIRTAVKEWLHLPPCTCDAILYSSTRDGGLGITKLAGLIPSVQARRLHRIAQSSDDTMKCFMEKEKMEQLHKKLWIQAGGDRENIPSIWEAPPSSEPPNNVSTNSEWEAPTQKDKFPKPCNWRKNEFKKWTKLASQGRGIVNFERDKISNHWIQYYRRIPHRKLLTALQLRANVYPTREFLARGRQDQYIKACRHCDADIESCAHIIGNCPVTQDARIKRHNYICELLLEEAKKKDWVVFKEPHIRDSNKELYKPDLIFVKDARALVVDVTVRYEAAKSSLEEAAAEKVRKYKHLETEVRHLTNAKDVTFVGFPLGARGKWHQDNFKLLTELGLSKSRQVKMAETFSTVALFSSVDIVHMFASRARKSMVM

SEQ ID NO: 1666 - protein, 991 aa, synthetic construct
  source 1..991: note = Description of Artificial Sequence: Synthetic polypeptide
MGIHGVPAAMAERPFQCRICMRNFSQSSNLARHIRTHTGEKPFACDICGRKFARTDYLVDHTKIHTGSQKPFQCRICMRNFSYNTHLTRHIRTHTGEKPFACDICGRKFAQGYNLAGHTKIHLRGSGGGSTATRDKKDTVTREKHPKKPFQKWMKDRAIKKGNYLRFQRLFYLDRGKLAKIILDDIECLSCDIPLSEIYSVFKTRWETTGSFKSLGDFKTYGKADNTAFRELITAKEIEKNVQEMSKGSAPGPDGITLGDVVKMDPEFSRTMEIFNLWLTTGKIPDMVRGCRTVLIPKSSKPDRLKDINNWRPITIGSILLRLFSRIVTARLSKACPLNPRQRGFIRAAGCSENLKLLQTIIWSAKREHRPLGVVFVDIAKAFDTVSHQHIIHALQQREVDPHIVGLVSNMYENISTYITTKRNTHTDKIQIRVGVKQGDPMSPLLFNLAMDPLLCKLEESGKGYHRGQSSITAMAFADDLVLLSDSWENMNTNISILETFCNLTGLKTQGQKCHGFYIKPTKDSYTINDCAAWTINGTPLNMIDPGESEKYLGLQFDPWIGIARSGLSTKLDFWLQRIDQAPLKPLQKTDILKTYTIPRLIYIADHSEVKTALLETLDQKIRTAVKEWLHLPPCTCDAILYSSTRDGGLGITKLAGLIPSVQARRLHRIAQSSDDTMKCFMEKEKMEQLHKKLWIQAGGDRENIPSIWEAPPSSEPPNNVSTNSEWEAPTQKDKFPKPCNWRKNEFKKWTKLASQGRGIVNFERDKISNHWIQYYRRIPHRKLLTALQLRANVYPTREFLARGRQDQYIKACRHCDADIESCAHIIGNCPVTQDARIKRHNYICELLLEEAKKKDWVVFKEPHIRDSNKELYKPDLIFVKDARALVVDVTVRYEAAKSSLEEAAAEKVRKYKHLETEVRHLTNAKDVTFVGFPLGARGKWHQDNFKLLTELGLSKSRQVKMAETFSTVALFSSVDIVHMFASRARKSMVM

SEQ ID NO: 1667 - protein, 1003 aa, synthetic construct
  source 1..1003: note = Description of Artificial Sequence: Synthetic polypeptide
MGIHGVPAAMAERPFQCRICMRNFSQSSNLARHIRTHTGEKPFACDICGRKFARTDYLVDHTKIHTGSQKPFQCRICMRNFSYNTHLTRHIRTHTGEKPFACDICGRKFAQGYNLAGHTKIHLRGSSGSETPGTSESATPESTATRDKKDTVTREKHPKKPFQKWMKDRAIKKGNYLRFQRLFYLDRGKLAKIILDDIECLSCDIPLSEIYSVFKTRWETTGSFKSLGDFKTYGKADNTAFRELITAKEIEKNVQEMSKGSAPGPDGITLGDVVKMDPEFSRTMEIFNLWLTTGKIPDMVRGCRTVLIPKSSKPDRLKDINNWRPITIGSILLRLFSRIVTARLSKACPLNPRQRGFIRAAGCSENLKLLQTIIWSAKREHRPLGVVFVDIAKAFDTVSHQHIIHALQQREVDPHIVGLVSNMYENISTYITTKRNTHTDKIQIRVGVKQGDPMSPLLFNLAMDPLLCKLEESGKGYHRGQSSITAMAFADDLVLLSDSWENMNTNISILETFCNLTGLKTQGQKCHGFYIKPTKDSYTINDCAAWTINGTPLNMIDPGESEKYLGLQFDPWIGIARSGLSTKLDFWLQRIDQAPLKPLQKTDILKTYTIPRLIYIADHSEVKTALLETLDQKIRTAVKEWLHLPPCTCDAILYSSTRDGGLGITKLAGLIPSVQARRLHRIAQSSDDTMKCFMEKEKMEQLHKKLWIQAGGDRENIPSIWEAPPSSEPPNNVSTNSEWEAPTQKDKFPKPCNWRKNEFKKWTKLASQGRGIVNFERDKISNHWIQYYRRIPHRKLLTALQLRANVYPTREFLARGRQDQYIKACRHCDADIESCAHIIGNCPVTQDARIKRHNYICELLLEEAKKKDWVVFKEPHIRDSNKELYKPDLIFVKDARALVVDVTVRYEAAKSSLEEAAAEKVRKYKHLETEVRHLTNAKDVTFVGFPLGARGKWHQDNFKLLTELGLSKSRQVKMAETFSTVALFSSVDIVHMFASRARKSMVM

SEQ ID NO: 1668 - protein, 1003 aa, synthetic construct
  source 1..1003: note = Description of Artificial Sequence: Synthetic polypeptide
MGIHGVPAAMAERPFQCRICMRNFSQSSNLARHIRTHTGEKPFACDICGRKFARTDYLVDHTKIHTGSQKPFQCRICMRNFSYNTHLTRHIRTHTGEKPFACDICGRKFAQGYNLAGHTKIHLRGSGGGSCFGCLESISQIRTATRDKKDTVTREKHPKKPFQKWMKDRAIKKGNYLRFQRLFYLDRGKLAKIILDDIECLSCDIPLSEIYSVFKTRWETTGSFKSLGDFKTYGKADNTAFRELITAKEIEKNVQEMSKGSAPGPDGITLGDVVKMDPEFSRTMEIFNLWLTTGKIPDMVRGCRTVLIPKSSKPDRLKDINNWRPITIGSILLRLFSRIVTARLSKACPLNPRQRGFIRAAGCSENLKLLQTIIWSAKREHRPLGVVFVDIAKAFDTVSHQHIIHALQQREVDPHIVGLVSNMYENISTYITTKRNTHTDKIQIRVGVKQGDPMSPLLFNLAMDPLLCKLEESGKGYHRGQSSITAMAFADDLVLLSDSWENMNTNISILETFCNLTGLKTQGQKCHGFYIKPTKDSYTINDCAAWTINGTPLNMIDPGESEKYLGLQFDPWIGIARSGLSTKLDFWLQRIDQAPLKPLQKTDILKTYTIPRLIYIADHSEVKTALLETLDQKIRTAVKEWLHLPPCTCDAILYSSTRDGGLGITKLAGLIPSVQARRLHRIAQSSDDTMKCFMEKEKMEQLHKKLWIQAGGDRENIPSIWEAPPSSEPPNNVSTNSEWEAPTQKDKFPKPCNWRKNEFKKWTKLASQGRGIVNFERDKISNHWIQYYRRIPHRKLLTALQLRANVYPTREFLARGRQDQYIKACRHCDADIESCAHIIGNCPVTQDARIKRHNYICELLLEEAKKKDWVVFKEPHIRDSNKELYKPDLIFVKDARALVVDVTVRYEAAKSSLEEAAAEKVRKYKHLETEVRHLTNAKDVTFVGFPLGARGKWHQDNFKLLTELGLSKSRQVKMAETFSTVALFSSVDIVHMFASRARKSMVM

SEQ ID NO: 1669 - protein, 1015 aa, synthetic construct
  source 1..1015: note = Description of Artificial Sequence: Synthetic polypeptide
MGIHGVPAAMAERPFQCRICMRNFSQSSNLARHIRTHTGEKPFACDICGRKFARTDYLVDHTKIHTGSQKPFQCRICMRNFSYNTHLTRHIRTHTGEKPFACDICGRKFAQGYNLAGHTKIHLRGSSGSETPGTSESATPESCFGCLESISQIRTATRDKKDTVTREKHPKKPFQKWMKDRAIKKGNYLRFQRLFYLDRGKLAKIILDDIECLSCDIPLSEIYSVFKTRWETTGSFKSLGDFKTYGKADNTAFRELITAKEIEKNVQEMSKGSAPGPDGITLGDVVKMDPEFSRTMEIFNLWLTTGKIPDMVRGCRTVLIPKSSKPDRLKDINNWRPITIGSILLRLFSRIVTARLSKACPLNPRQRGFIRAAGCSENLKLLQTIIWSAKREHRPLGVVFVDIAKAFDTVSHQHIIHALQQREVDPHIVGLVSNMYENISTYITTKRNTHTDKIQIRVGVKQGDPMSPLLFNLAMDPLLCKLEESGKGYHRGQSSITAMAFADDLVLLSDSWENMNTNISILETFCNLTGLKTQGQKCHGFYIKPTKDSYTINDCAAWTINGTPLNMIDPGESEKYLGLQFDPWIGIARSGLSTKLDFWLQRIDQAPLKPLQKTDILKTYTIPRLIYIADHSEVKTALLETLDQKIRTAVKEWLHLPPCTCDAILYSSTRDGGLGITKLAGLIPSVQARRLHRIAQSSDDTMKCFMEKEKMEQLHKKLWIQAGGDRENIPSIWEAPPSSEPPNNVSTNSEWEAPTQKDKFPKPCNWRKNEFKKWTKLASQGRGIVNFERDKISNHWIQYYRRIPHRKLLTALQLRANVYPTREFLARGRQDQYIKACRHCDADIESCAHIIGNCPVTQDARIKRHNYICELLLEEAKKKDWVVFKEPHIRDSNKELYKPDLIFVKDARALVVDVTVRYEAAKSSLEEAAAEKVRKYKHLETEVRHLTNAKDVTFVGFPLGARGKWHQDNFKLLTELGLSKSRQVKMAETFSTVALFSSVDIVHMFASRARKSMVM

SEQ ID NO: 1670 - protein, 1132 aa, synthetic construct
  source 1..1132: note = Description of Artificial Sequence: Synthetic polypeptide
MGIHGVPAAMAERPFQCRICMRNFSYNWHLQRHIRTHTGEKPFACDICGRKFARSDHLTTHTKIHTGSQKPFQCRICMRNFSHNYARDCHIRTHTGEKPFACDICGRKFAQNSTRIGHTKIHLRGSSGSETPGTSESATPESGIHGVPAAMAERPFQCRICMRNFSQSSNLARHIRTHTGEKPFACDICGRKFARTDYLVDHTKIHTGSQKPFQCRICMRNFSYNTHLTRHIRTHTGEKPFACDICGRKFAQGYNLAGHTKIHLRGSGGGSTATRDKKDTVTREKHPKKPFQKWMKDRAIKKGNYLRFQRLFYLDRGKLAKIILDDIECLSCDIPLSEIYSVFKTRWETTGSFKSLGDFKTYGKADNTAFRELITAKEIEKNVQEMSKGSAPGPDGITLGDVVKMDPEFSRTMEIFNLWLTTGKIPDMVRGCRTVLIPKSSKPDRLKDINNWRPITIGSILLRLFSRIVTARLSKACPLNPRQRGFIRAAGCSENLKLLQTIIWSAKREHRPLGVVFVDIAKAFDTVSHQHIIHALQQREVDPHIVGLVSNMYENISTYITTKRNTHTDKIQIRVGVKQGDPMSPLLFNLAMDPLLCKLEESGKGYHRGQSSITAMAFADDLVLLSDSWENMNTNISILETFCNLTGLKTQGQKCHGFYIKPTKDSYTINDCAAWTINGTPLNMIDPGESEKYLGLQFDPWIGIARSGLSTKLDFWLQRIDQAPLKPLQKTDILKTYTIPRLIYIADHSEVKTALLETLDQKIRTAVKEWLHLPPCTCDAILYSSTRDGGLGITKLAGLIPSVQARRLHRIAQSSDDTMKCFMEKEKMEQLHKKLWIQAGGDRENIPSIWEAPPSSEPPNNVSTNSEWEAPTQKDKFPKPCNWRKNEFKKWTKLASQGRGIVNFERDKISNHWIQYYRRIPHRKLLTALQLRANVYPTREFLARGRQDQYIKACRHCDADIESCAHIIGNCPVTQDARIKRHNYICELLLEEAKKKDWVVFKEPHIRDSNKELYKPDLIFVKDARALVVDVTVRYEAAKSSLEEAAAEKVRKYKHLETEVRHLTNAKDVTFVGFPLGARGKWHQDNFKLLTELGLSKSRQVKMAETFSTVALFSSVDIVHMFASRARKSMVM

SEQ ID NO: 1671 - protein, 1144 aa, synthetic construct
  source 1..1144: note = Description of Artificial Sequence: Synthetic polypeptide
MGIHGVPAAMAERPFQCRICMRNFSYNWHLQRHIRTHTGEKPFACDICGRKFARSDHLTTHTKIHTGSQKPFQCRICMRNFSHNYARDCHIRTHTGEKPFACDICGRKFAQNSTRIGHTKIHLRGSSGSETPGTSESATPESGIHGVPAAMAERPFQCRICMRNFSQSSNLARHIRTHTGEKPFACDICGRKFARTDYLVDHTKIHTGSQKPFQCRICMRNFSYNTHLTRHIRTHTGEKPFACDICGRKFAQGYNLAGHTKIHLRGSSGSETPGTSESATPESTATRDKKDTVTREKHPKKPFQKWMKDRAIKKGNYLRFQRLFYLDRGKLAKIILDDIECLSCDIPLSEIYSVFKTRWETTGSFKSLGDFKTYGKADNTAFRELITAKEIEKNVQEMSKGSAPGPDGITLGDVVKMDPEFSRTMEIFNLWLTTGKIPDMVRGCRTVLIPKSSKPDRLKDINNWRPITIGSILLRLFSRIVTARLSKACPLNPRQRGFIRAAGCSENLKLLQTIIWSAKREHRPLGVVFVDIAKAFDTVSHQHIIHALQQREVDPHIVGLVSNMYENISTYITTKRNTHTDKIQIRVGVKQGDPMSPLLFNLAMDPLLCKLEESGKGYHRGQSSITAMAFADDLVLLSDSWENMNTNISILETFCNLTGLKTQGQKCHGFYIKPTKDSYTINDCAAWTINGTPLNMIDPGESEKYLGLQFDPWIGIARSGLSTKLDFWLQRIDQAPLKPLQKTDILKTYTIPRLIYIADHSEVKTALLETLDQKIRTAVKEWLHLPPCTCDAILYSSTRDGGLGITKLAGLIPSVQARRLHRIAQSSDDTMKCFMEKEKMEQLHKKLWIQAGGDRENIPSIWEAPPSSEPPNNVSTNSEWEAPTQKDKFPKPCNWRKNEFKKWTKLASQGRGIVNFERDKISNHWIQYYRRIPHRKLLTALQLRANVYPTREFLARGRQDQYIKACRHCDADIESCAHIIGNCPVTQDARIKRHNYICELLLEEAKKKDWVVFKEPHIRDSNKELYKPDLIFVKDARALVVDVTVRYEAAKSSLEEAAAEKVRKYKHLETEVRHLTNAKDVTFVGFPLGARGKWHQDNFKLLTELGLSKSRQVKMAETFSTVALFSSVDIVHMFASRARKSMVM

SEQ ID NO: 1672 - protein, 1531 aa, synthetic construct
  source 1..1531: note = Description of Artificial Sequence: Synthetic polypeptide
MGIHGVPAAMAERPFQCRICMRNFSYNWHLQRHIRTHTGEKPFACDICGRKFARSDHLTTHTKIHTGSQKPFQCRICMRNFSHNYARDCHIRTHTGEKPFACDICGRKFAQNSTRIGHTKIHLRGSSGSETPGTSESATPESASCPKPGPPVSAGAMSLESGLTTHSVLAIERGPNSLANSGSDFGGGGLGLPLRLLRVSVGTQTSRSDWVDLVSWSHPGPTSKSQQVDLVSLFPKHRVDLLSKNDQVDLVAQFLPSKFPPNLAENDLALLVNLEFYRSDLHVYECVHFAAHWEGLSGLPEVYEQLAPQPCVGETLHSSLPRDSELFVPEEGSSEKESEDAPKTSPPTPGKHGLEQTGEEKVMVTVPDKNPPCPCCGTRVNSVLNLIEHLKVSHGKRGVCFRCAKCGKENSNYHSVVCHFPKCRGPETEKAPAGEWICEVCNRDFTTKIGLGQHKRLAHPAVRNQERIVASQPKETSNRGAHKRCWTKEEEELLIRLEAQFEGNKNINKLIAEHITTKTAKQISDKRRLLSRKPAEEPREEPGTCHHTRRAAASLRTEPEMSHHAQAEDRDNGPGRRPLPGRAAAGGRTMDEIRRHPDKGNGQQRPTKQKSEEQLQAYYKKTLEERLSAGALNTFPRAFKQVMEGRDIKLVINQTAQDCFGCLESISQIRTATRDKKDTVTREKHPKKPFQKWMKDRAIKKGNYLRFQRLFYLDRGKLAKIILDDIECLSCDIPLSEIYSVFKTRWETTGSFKSLGDFKTYGKADNTAFRELITAKEIEKNVQEMSKGSAPGPDGITLGDVVKMDPEFSRTMEIFNLWLTTGKIPDMVRGCRTVLIPKSSKPDRLKDINNWRPITIGSILLRLFSRIVTARLSKACPLNPRQRGFIRAAGCSENLKLLQTIIWSAKREHRPLGVVFVDIAKAFDTVSHQHIIHALQQREVDPHIVGLVSNMYENISTYITTKRNTHTDKIQIRVGVKQGDPMSPLLFNLAMDPLLCKLEESGKGYHRGQSSITAMAFADDLVLLSDSWENMNTNISILETFCNLTGLKTQGQKCHGFYIKPTKDSYTINDCAAWTINGTPLNMIDPGESEKYLGLQFDPWIGIARSGLSTKLDFWLQRIDQAPLKPLQKTDILKTYTIPRLIYIADHSEVKTALLETLDQKIRTAVKEWLHLPPCTCDAILYSSTRDGGLGITKLAGLIPSVQARRLHRIAQSSDDTMKCFMEKEKMEQLHKKLWIQAGGDRENIPSIWEAPPSSEPPNNVSTNSEWEAPTQKDKFPKPCNWRKNEFKKWTKLASQGRGIVNFERDKISNHWIQYYRRIPHRKLLTALQLRANVYPTREFLARGRQDQYIKACRHCDADIESCAHIIGNCPVTQDARIKRHNYICELLLEEAKKKDWVVFKEPHIRDSNKELYKPDLIFVKDARALVVDVTVRYEAAKSSLEEAAAEKVRKYKHLETEVRHLTNAKDVTFVGFPLGARGKWHQDNFKLLTELGLSKSRQVKMAETFSTVALFSSVDIVHMFASRARKSMVM

SEQ ID NO: 1673 - protein, 1531 aa, synthetic construct
  source 1..1531: note = Description of Artificial Sequence: Synthetic polypeptide
MGIHGVPAAMAERPFQCRICMRNFSQSSNLARHIRTHTGEKPFACDICGRKFARTDYLVDHTKIHTGSQKPFQCRICMRNFSYNTHLTRHIRTHTGEKPFACDICGRKFAQGYNLAGHTKIHLRGSSGSETPGTSESATPESASCPKPGPPVSAGAMSLESGLTTHSVLAIERGPNSLANSGSDFGGGGLGLPLRLLRVSVGTQTSRSDWVDLVSWSHPGPTSKSQQVDLVSLFPKHRVDLLSKNDQVDLVAQFLPSKFPPNLAENDLALLVNLEFYRSDLHVYECVHFAAHWEGLSGLPEVYEQLAPQPCVGETLHSSLPRDSELFVPEEGSSEKESEDAPKTSPPTPGKHGLEQTGEEKVMVTVPDKNPPCPCCGTRVNSVLNLIEHLKVSHGKRGVCFRCAKCGKENSNYHSVVCHFPKCRGPETEKAPAGEWICEVCNRDFTTKIGLGQHKRLAHPAVRNQERIVASQPKETSNRGAHKRCWTKEEEELLIRLEAQFEGNKNINKLIAEHITTKTAKQISDKRRLLSRKPAEEPREEPGTCHHTRRAAASLRTEPEMSHHAQAEDRDNGPGRRPLPGRAAAGGRTMDEIRRHPDKGNGQQRPTKQKSEEQLQAYYKKTLEERLSAGALNTFPRAFKQVMEGRDIKLVINQTAQDCFGCLESISQIRTATRDKKDTVTREKHPKKPFQKWMKDRAIKKGNYLRFQRLFYLDRGKLAKIILDDIECLSCDIPLSEIYSVFKTRWETTGSFKSLGDFKTYGKADNTAFRELITAKEIEKNVQEMSKGSAPGPDGITLGDVVKMDPEFSRTMEIFNLWLTTGKIPDMVRGCRTVLIPKSSKPDRLKDINNWRPITIGSILLRLFSRIVTARLSKACPLNPRQRGFIRAAGCSENLKLLQTIIWSAKREHRPLGVVFVDIAKAFDTVSHQHIIHALQQREVDPHIVGLVSNMYENISTYITTKRNTHTDKIQIRVGVKQGDPMSPLLFNLAMDPLLCKLEESGKGYHRGQSSITAMAFADDLVLLSDSWENMNTNISILETFCNLTGLKTQGQKCHGFYIKPTKDSYTINDCAAWTINGTPLNMIDPGESEKYLGLQFDPWIGIARSGLSTKLDFWLQRIDQAPLKPLQKTDILKTYTIPRLIYIADHSEVKTALLETLDQKIRTAVKEWLHLPPCTCDAILYSSTRDGGLGITKLAGLIPSVQARRLHRIAQSSDDTMKCFMEKEKMEQLHKKLWIQAGGDRENIPSIWEAPPSSEPPNNVSTNSEWEAPTQKDKFPKPCNWRKNEFKKWTKLASQGRGIVNFERDKISNHWIQYYRRIPHRKLLTALQLRANVYPTREFLARGRQDQYIKACRHCDADIESCAHIIGNCPVTQDARIKRHNYICELLLEEAKKKDWVVFKEPHIRDSNKELYKPDLIFVKDARALVVDVTVRYEAAKSSLEEAAAEKVRKYKHLETEVRHLTNAKDVTFVGFPLGARGKWHQDNFKLLTELGLSKSRQVKMAETFSTVALFSSVDIVHMFASRARKSMVM

SEQ ID NO: 1674 - protein, 1672 aa, synthetic construct
  source 1..1672: note = Description of Artificial Sequence: Synthetic polypeptide
MGIHGVPAAMAERPFQCRICMRNFSYNWHLQRHIRTHTGEKPFACDICGRKFARSDHLTTHTKIHTGSQKPFQCRICMRNFSHNYARDCHIRTHTGEKPFACDICGRKFAQNSTRIGHTKIHLRGSSGSETPGTSESATPESGIHGVPAAMAERPFQCRICMRNFSQSSNLARHIRTHTGEKPFACDICGRKFARTDYLVDHTKIHTGSQKPFQCRICMRNFSYNTHLTRHIRTHTGEKPFACDICGRKFAQGYNLAGHTKIHLRGSSGSETPGTSESATPESASCPKPGPPVSAGAMSLESGLTTHSVLAIERGPNSLANSGSDFGGGGLGLPLRLLRVSVGTQTSRSDWVDLVSWSHPGPTSKSQQVDLVSLFPKHRVDLLSKNDQVDLVAQFLPSKFPPNLAENDLALLVNLEFYRSDLHVYECVHFAAHWEGLSGLPEVYEQLAPQPCVGETLHSSLPRDSELFVPEEGSSEKESEDAPKTSPPTPGKHGLEQTGEEKVMVTVPDKNPPCPCCGTRVNSVLNLIEHLKVSHGKRGVCFRCAKCGKENSNYHSVVCHFPKCRGPETEKAPAGEWICEVCNRDFTTKIGLGQHKRLAHPAVRNQERIVASQPKETSNRGAHKRCWTKEEEELLIRLEAQFEGNKNINKLIAEHITTKTAKQISDKRRLLSRKPAEEPREEPGTCHHTRRAAASLRTEPEMSHHAQAEDRDNGPGRRPLPGRAAAGGRTMDEIRRHPDKGNGQQRPTKQKSEEQLQAYYKKTLEERLSAGALNTFPRAFKQVMEGRDIKLVINQTAQDCFGCLESISQIRTATRDKKDTVTREKHPKKPFQKWMKDRAIKKGNYLRFQRLFYLDRGKLAKIILDDIECLSCDIPLSEIYSVFKTRWETTGSFKSLGDFKTYGKADNTAFRELITAKEIEKNVQEMSKGSAPGPDGITLGDVVKMDPEFSRTMEIFNLWLTTGKIPDMVRGCRTVLIPKSSKPDRLKDINNWRPITIGSILLRLFSRIVTARLSKACPLNPRQRGFIRAAGCSENLKLLQTIIWSAKREHRPLGVVFVDIAKAFDTVSHQHIIHALQQREVDPHIVGLVSNMYENISTYITTKRNTHTDKIQIRVGVKQGDPMSPLLFNLAMDPLLCKLEESGKGYHRGQSSITAMAFADDLVLLSDSWENMNTNISILETFCNLTGLKTQGQKCHGFYIKPTKDSYTINDCAAWTINGTPLNMIDPGESEKYLGLQFDPWIGIARSGLSTKLDFWLQRIDQAPLKPLQKTDILKTYTIPRLIYIADHSEVKTALLETLDQKIRTAVKEWLHLPPCTCDAILYSSTRDGGLGITKLAGLIPSVQARRLHRIAQSSDDTMKCFMEKEKMEQLHKKLWIQAGGDRENIPSIWEAPPSSEPPNNVSTNSEWEAPTQKDKFPKPCNWRKNEFKKWTKLASQGRGIVNFERDKISNHWIQYYRRIPHRKLLTALQLRANVYPTREFLARGRQDQYIKACRHCDADIESCAHIIGNCPVTQDARIKRHNYICELLLEEAKKKDWVVFKEPHIRDSNKELYKPDLIFVKDARALVVDVTVRYEAAKSSLEEAAAEKVRKYKHLETEVRHLTNAKDVTFVGFPLGARGKWHQDNFKLLTELGLSKSRQVKMAETFSTVALFSSVDIVHMFASRARKSMVM

SEQ ID NO: 1675 - protein, 1531 aa, synthetic construct
  source 1..1531: note = Description of Artificial Sequence: Synthetic polypeptide
MGIHGVPAAMAERPFQCRICMRNFSYNWHLQRHIRTHTGEKPFACDICGRKFARSDHLTTHTKIHTGSQKPFQCRICMRNFSHNYARDCHIRTHTGEKPFACDICGRKFAQNSTRIGHTKIHLRGSSGSETPGTSESATPESASCPKPGPPVSAGAMSLESGLTTHSVLAIERGPNSLANSGSDFGGGGLGLPLRLLRVSVGTQTSRSDWVDLVSWSHPGPTSKSQQVDLVSLFPKHRVDLLSKNDQVDLVAQFLPSKFPPNLAENDLALLVNLEFYRSDLHVYECVHFAAHWEGLSGLPEVYEQLAPQPCVGETLHSSLPRDSELFVPEEGSSEKESEDAPKTSPPTPGKHGLEQTGEEKVMVTVPDKNPPSPSSGTRVNSVLNLIEHLKVSHGKRGVCFRCAKCGKENSNYHSVVCHFPKCRGPETEKAPAGEWISEVSNRDFTTKIGLGQHKRLAHPAVRNQERIVASQPKETSNRGAHKACATKEEEELLIRLEAQFEGNKNINKLIAEHITTKTAKQISDKRRLLSRKPAEEPREEPGTCHHTRRAAASLRTEPEMSHHAQAEDRDNGPGRRPLPGRAAAGGRTMDEIRRHPDKGNGQQRPTKQKSEEQLQAYYKKTLEERLSAGALNTFPRAFKQVMEGRDIKLVINQTAQDCFGCLESISQIRTATRDKKDTVTREKHPKKPFQKWMKDRAIKKGNYLRFQRLFYLDRGKLAKIILDDIECLSCDIPLSEIYSVFKTRWETTGSFKSLGDFKTYGKADNTAFRELITAKEIEKNVQEMSKGSAPGPDGITLGDVVKMDPEFSRTMEIFNLWLTTGKIPDMVRGCRTVLIPKSSKPDRLKDINNWRPITIGSILLRLFSRIVTARLSKACPLNPRQRGFIRAAGCSENLKLLQTIIWSAKREHRPLGVVFVDIAKAFDTVSHQHIIHALQQREVDPHIVGLVSNMYENISTYITTKRNTHTDKIQIRVGVKQGDPMSPLLFNLAMDPLLCKLEESGKGYHRGQSSITAMAFADDLVLLSDSWENMNTNISILETFCNLTGLKTQGQKCHGFYIKPTKDSYTINDCAAWTINGTPLNMIDPGESEKYLGLQFDPWIGIARSGLSTKLDFWLQRIDQAPLKPLQKTDILKTYTIPRLIYIADHSEVKTALLETLDQKIRTAVKEWLHLPPCTCDAILYSSTRDGGLGITKLAGLIPSVQARRLHRIAQSSDDTMKCFMEKEKMEQLHKKLWIQAGGDRENIPSIWEAPPSSEPPNNVSTNSEWEAPTQKDKFPKPCNWRKNEFKKWTKLASQGRGIVNFERDKISNHWIQYYRRIPHRKLLTALQLRANVYPTREFLARGRQDQYIKACRHCDADIESCAHIIGNCPVTQDARIKRHNYICELLLEEAKKKDWVVFKEPHIRDSNKELYKPDLIFVKDARALVVDVTVRYEAAKSSLEEAAAEKVRKYKHLETEVRHLTNAKDVTFVGFPLGARGKWHQDNFKLLTELGLSKSRQVKMAETFSTVALFSSVDIVHMFASRARKSMVM

SEQ ID NO: 1676 - protein, 1531 aa, synthetic construct
  source 1..1531: note = Description of Artificial Sequence: Synthetic polypeptide
MGIHGVPAAMAERPFQCRICMRNFSQSSNLARHIRTHTGEKPFACDICGRKFARTDYLVDHTKIHTGSQKPFQCRICMRNFSYNTHLTRHIRTHTGEKPFACDICGRKFAQGYNLAGHTKIHLRGSSGSETPGTSESATPESASCPKPGPPVSAGAMSLESGLTTHSVLAIERGPNSLANSGSDFGGGGLGLPLRLLRVSVGTQTSRSDWVDLVSWSHPGPTSKSQQVDLVSLFPKHRVDLLSKNDQVDLVAQFLPSKFPPNLAENDLALLVNLEFYRSDLHVYECVHFAAHWEGLSGLPEVYEQLAPQPCVGETLHSSLPRDSELFVPEEGSSEKESEDAPKTSPPTPGKHGLEQTGEEKVMVTVPDKNPPSPSSGTRVNSVLNLIEHLKVSHGKRGVCFRCAKCGKENSNYHSVVCHFPKCRGPETEKAPAGEWISEVSNRDFTTKIGLGQHKRLAHPAVRNQERIVASQPKETSNRGAHKACATKEEEELLIRLEAQFEGNKNINKLIAEHITTKTAKQISDKRRLLSRKPAEEPREEPGTCHHTRRAAASLRTEPEMSHHAQAEDRDNGPGRRPLPGRAAAGGRTMDEIRRHPDKGNGQQRPTKQKSEEQLQAYYKKTLEERLSAGALNTFPRAFKQVMEGRDIKLVINQTAQDCFGCLESISQIRTATRDKKDTVTREKHPKKPFQKWMKDRAIKKGNYLRFQRLFYLDRGKLAKIILDDIECLSCDIPLSEIYSVFKTRWETTGSFKSLGDFKTYGKADNTAFRELITAKEIEKNVQEMSKGSAPGPDGITLGDVVKMDPEFSRTMEIFNLWLTTGKIPDMVRGCRTVLIPKSSKPDRLKDINNWRPITIGSILLRLFSRIVTARLSKACPLNPRQRGFIRAAGCSENLKLLQTIIWSAKREHRPLGVVFVDIAKAFDTVSHQHIIHALQQREVDPHIVGLVSNMYENISTYITTKRNTHTDKIQIRVGVKQGDPMSPLLFNLAMDPLLCKLEESGKGYHRGQSSITAMAFADDLVLLSDSWENMNTNISILETFCNLTGLKTQGQKCHGFYIKPTKDSYTINDCAAWTINGTPLNMIDPGESEKYLGLQFDPWIGIARSGLSTKLDFWLQRIDQAPLKPLQKTDILKTYTIPRLIYIADHSEVKTALLETLDQKIRTAVKEWLHLPPCTCDAILYSSTRDGGLGITKLAGLIPSVQARRLHRIAQSSDDTMKCFMEKEKMEQLHKKLWIQAGGDRENIPSIWEAPPSSEPPNNVSTNSEWEAPTQKDKFPKPCNWRKNEFKKWTKLASQGRGIVNFERDKISNHWIQYYRRIPHRKLLTALQLRANVYPTREFLARGRQDQYIKACRHCDADIESCAHIIGNCPVTQDARIKRHNYICELLLEEAKKKDWVVFKEPHIRDSNKELYKPDLIFVKDARALVVDVTVRYEAAKSSLEEAAAEKVRKYKHLETEVRHLTNAKDVTFVGFPLGARGKWHQDNFKLLTELGLSKSRQVKMAETFSTVALFSSVDIVHMFASRARKSMVM

SEQ ID NO: 1677 - protein, 1672 aa, synthetic construct
  source 1..1672: note = Description of Artificial Sequence: Synthetic polypeptide
MGIHGVPAAMAERPFQCRICMRNFSYNWHLQRHIRTHTGEKPFACDICGRKFARSDHLTTHTKIHTGSQKPFQCRICMRNFSHNYARDCHIRTHTGEKPFACDICGRKFAQNSTRIGHTKIHLRGSSGSETPGTSESATPESGIHGVPAAMAERPFQCRICMRNFSQSSNLARHIRTHTGEKPFACDICGRKFARTDYLVDHTKIHTGSQKPFQCRICMRNFSYNTHLTRHIRTHTGEKPFACDICGRKFAQGYNLAGHTKIHLRGSSGSETPGTSESATPESASCPKPGPPVSAGAMSLESGLTTHSVLAIERGPNSLANSGSDFGGGGLGLPLRLLRVSVGTQTSRSDWVDLVSWSHPGPTSKSQQVDLVSLFPKHRVDLLSKNDQVDLVAQFLPSKFPPNLAENDLALLVNLEFYRSDLHVYECVHFAAHWEGLSGLPEVYEQLAPQPCVGETLHSSLPRDSELFVPEEGSSEKESEDAPKTSPPTPGKHGLEQTGEEKVMVTVPDKNPPSPSSGTRVNSVLNLIEHLKVSHGKRGVCFRCAKCGKENSNYHSVVCHFPKCRGPETEKAPAGEWISEVSNRDFTTKIGLGQHKRLAHPAVRNQERIVASQPKETSNRGAHKACATKEEEELLIRLEAQFEGNKNINKLIAEHITTKTAKQISDKRRLLSRKPAEEPREEPGTCHHTRRAAASLRTEPEMSHHAQAEDRDNGPGRRPLPGRAAAGGRTMDEIRRHPDKGNGQQRPTKQKSEEQLQAYYKKTLEERLSAGALNTFPRAFKQVMEGRDIKLVINQTAQDCFGCLESISQIRTATRDKKDTVTREKHPKKPFQKWMKDRAIKKGNYLRFQRLFYLDRGKLAKIILDDIECLSCDIPLSEIYSVFKTRWETTGSFKSLGDFKTYGKADNTAFRELITAKEIEKNVQEMSKGSAPGPDGITLGDVVKMDPEFSRTMEIFNLWLTTGKIPDMVRGCRTVLIPKSSKPDRLKDINNWRPITIGSILLRLFSRIVTARLSKACPLNPRQRGFIRAAGCSENLKLLQTIIWSAKREHRPLGVVFVDIAKAFDTVSHQHIIHALQQREVDPHIVGLVSNMYENISTYITTKRNTHTDKIQIRVGVKQGDPMSPLLFNLAMDPLLCKLEESGKGYHRGQSSITAMAFADDLVLLSDSWENMNTNISILETFCNLTGLKTQGQKCHGFYIKPTKDSYTINDCAAWTINGTPLNMIDPGESEKYLGLQFDPWIGIARSGLSTKLDFWLQRIDQAPLKPLQKTDILKTYTIPRLIYIADHSEVKTALLETLDQKIRTAVKEWLHLPPCTCDAILYSSTRDGGLGITKLAGLIPSVQARRLHRIAQSSDDTMKCFMEKEKMEQLHKKLWIQAGGDRENIPSIWEAPPSSEPPNNVSTNSEWEAPTQKDKFPKPCNWRKNEFKKWTKLASQGRGIVNFERDKISNHWIQYYRRIPHRKLLTALQLRANVYPTREFLARGRQDQYIKACRHCDADIESCAHIIGNCPVTQDARIKRHNYICELLLEEAKKKDWVVFKEPHIRDSNKELYKPDLIFVKDARALVVDVTVRYEAAKSSLEEAAAEKVRKYKHLETEVRHLTNAKDVTFVGFPLGARGKWHQDNFKLLTELGLSKSRQVKMAETFSTVALFSSVDIVHMFASRARKSMVM

SEQ ID NO: 1678 - protein, 2278 aa, synthetic construct
  source 1..2278: note = Description of Artificial Sequence: Synthetic polypeptide
MAPKKKRKVGIHGVPAADKKYSIGLDIGTNSVGWAVITDEYKVPSKKFKVLGNTDRHSIKKNLIGALLFDSGETAEATRLKRTARRRYTRRKNRICYLQEIFSNEMAKVDDSFFHRLEESFLVEEDKKHERHPIFGNIVDEVAYHEKYPTIYHLRKKLVDSTDKADLRLIYLALAHMIKFRGHFLIEGDLNPDNSDVDKLFIQLVQTYNQLFEENPINASGVDAKAILSARLSKSRRLENLIAQLPGEKKNGLFGNLIALSLGLTPNFKSNFDLAEDAKLQLSKDTYDDDLDNLLAQIGDQYADLFLAAKNLSDAILLSDILRVNTEITKAPLSASMIKRYDEHHQDLTLLKALVRQQLPEKYKEIFFDQSKNGYAGYIDGGASQEEFYKFIKPILEKMDGTEELLVKLNREDLLRKQRTFDNGSIPHQIHLGELHAILRRQEDFYPFLKDNREKIEKILTFRIPYYVGPLARGNSRFAWMTRKSEETITPWNFEEVVDKGASAQSFIERMTNFDKNLPNEKVLPKHSLLYEYFTVYNELTKVKYVTEGMRKPAFLSGEQKKAIVDLLFKTNRKVTVKQLKEDYFKKIECFDSVEISGVEDRFNASLGTYHDLLKIIKDKDFLDNEENEDILEDIVLTLTLFEDREMIEERLKTYAHLFDDKVMKQLKRRRYTGWGRLSRKLINGIRDKQSGKTILDFLKSDGFANRNFMQLIHDDSLTFKEDIQKAQVSGQGDSLHEHIANLAGSPAIKKGILQTVKVVDELVKVMGRHKPENIVIEMARENQTTQKGQKNSRERMKRIEEGIKELGSQILKEHPVENTQLQNEKLYLYYLQNGRDMYVDQELDINRLSDYDVDAIVPQSFLKDDSIDNKVLTRSDKNRGKSDNVPSEEVVKKMKNYWRQLLNAKLITQRKFDNLTKAERGGLSELDKAGFIKRQLVETRQITKHVAQILDSRMNTKYDENDKLIREVKVITLKSKLVSDFRKDFQFYKVREINNYHHAHDAYLNAVVGTALIKKYPKLESEFVYGDYKVYDVRKMIAKSEQEIGKATAKYFFYSNIMNFFKTEITLANGEIRKRPLIETNGETGEIVWDKGRDFATVRKVLSMPQVNIVKKTEVQTGGFSKESILPKRNSDKLIARKKDWDPKKYGGFDSPTVAYSVLVVAKVEKGKSKKLKSVKELLGITIMERSSFEKNPIDFLEAKGYKEVKKDLIIKLPKYSLFELENGRKRMLASAGELQKGNELALPSKYVNFLYLASHYEKLKGSPEDNEQKQLFVEQHKHYLDEIIEQISEFSKRVILADANLDKVLSAYNKHRDKPIREQAENIIHLFTLTNLGAPAAFKYFDTTIDRKRYTSTKEVLDATLIHQSITGLYETRIDLSQLGGDSGGSSGGSSGSETPGTSESATPESSGGSSGGSSTATRDKKDTVTREKHPKKPFQKWMKDRAIKKGNYLRFQRLFYLDRGKLAKIILDDIECLSCDIPLSEIYSVFKTRWETTGSFKSLGDFKTYGKADNTAFRELITAKEIEKNVQEMSKGSAPGPDGITLGDVVKMDPEFSRTMEIFNLWLTTGKIPDMVRGCRTVLIPKSSKPDRLKDINNWRPITIGSILLRLFSRIVTARLSKACPLNPRQRGFIRAAGCSENLKLLQTIIWSAKREHRPLGVVFVDIAKAFDTVSHQHIIHALQQREVDPHIVGLVSNMYENISTYITTKRNTHTDKIQIRVGVKQGDPMSPLLFNLAMDPLLCKLEESGKGYHRGQSSITAMAFADDLVLLSDSWENMNTNISILETFCNLTGLKTQGQKCHGFYIKPTKDSYTINDCAAWTINGTPLNMIDPGESEKYLGLQFDPWIGIARSGLSTKLDFWLQRIDQAPLKPLQKTDILKTYTIPRLIYIADHSEVKTALLETLDQKIRTAVKEWLHLPPCTCDAILYSSTRDGGLGITKLAGLIPSVQARRLHRIAQSSDDTMKCFMEKEKMEQLHKKLWIQAGGDRENIPSIWEAPPSSEPPNNVSTNSEWEAPTQKDKFPKPCNWRKNEFKKWTKLASQGRGIVNFERDKISNHWIQYYRRIPHRKLLTALQLRANVYPTREFLARGRQDQYIKACRHCDADIESCAHIIGNCPVTQDARIKRHNYICELLLEEAKKKDWVVFKEPHIRDSNKELYKPDLIFVKDARALVVDVTVRYEAAKSSLEEAAAEKVRKYKHLETEVRHLTNAKDVTFVGFPLGARGKWHQDNFKLLTELGLSKSRQVKMAETFSTVALFSSVDIVHMFASRARKSMVM

SEQ ID NO: 1679 - protein, 2278 aa, synthetic construct
  source 1..2278: note = Description of Artificial Sequence: Synthetic polypeptide
MAPKKKRKVGIHGVPAADKKYSIGLAIGTNSVGWAVITDEYKVPSKKFKVLGNTDRHSIKKNLIGALLFDSGETAEATRLKRTARRRYTRRKNRICYLQEIFSNEMAKVDDSFFHRLEESFLVEEDKKHERHPIFGNIVDEVAYHEKYPTIYHLRKKLVDSTDKADLRLIYLALAHMIKFRGHFLIEGDLNPDNSDVDKLFIQLVQTYNQLFEENPINASGVDAKAILSARLSKSRRLENLIAQLPGEKKNGLFGNLIALSLGLTPNFKSNFDLAEDAKLQLSKDTYDDDLDNLLAQIGDQYADLFLAAKNLSDAILLSDILRVNTEITKAPLSASMIKRYDEHHQDLTLLKALVRQQLPEKYKEIFFDQSKNGYAGYIDGGASQEEFYKFIKPILEKMDGTEELLVKLNREDLLRKQRTFDNGSIPHQIHLGELHAILRRQEDFYPFLKDNREKIEKILTFRIPYYVGPLARGNSRFAWMTRKSEETITPWNFEEVVDKGASAQSFIERMTNFDKNLPNEKVLPKHSLLYEYFTVYNELTKVKYVTEGMRKPAFLSGEQKKAIVDLLFKTNRKVTVKQLKEDYFKKIECFDSVEISGVEDRFNASLGTYHDLLKIIKDKDFLDNEENEDILEDIVLTLTLFEDREMIEERLKTYAHLFDDKVMKQLKRRRYTGWGRLSRKLINGIRDKQSGKTILDFLKSDGFANRNFMQLIHDDSLTFKEDIQKAQVSGQGDSLHEHIANLAGSPAIKKGILQTVKVVDELVKVMGRHKPENIVIEMARENQTTQKGQKNSRERMKRIEEGIKELGSQILKEHPVENTQLQNEKLYLYYLQNGRDMYVDQELDINRLSDYDVDAIVPQSFLKDDSIDNKVLTRSDKNRGKSDNVPSEEVVKKMKNYWRQLLNAKLITQRKFDNLTKAERGGLSELDKAGFIKRQLVETRQITKHVAQILDSRMNTKYDENDKLIREVKVITLKSKLVSDFRKDFQFYKVREINNYHHAHDAYLNAVVGTALIKKYPKLESEFVYGDYKVYDVRKMIAKSEQEIGKATAKYFFYSNIMNFFKTEITLANGEIRKRPLIETNGETGEIVWDKGRDFATVRKVLSMPQVNIVKKTEVQTGGFSKESILPKRNSDKLIARKKDWDPKKYGGFDSPTVAYSVLVVAKVEKGKSKKLKSVKELLGITIMERSSFEKNPIDFLEAKGYKEVKKDLIIKLPKYSLFELENGRKRMLASAGELQKGNELALPSKYVNFLYLASHYEKLKGSPEDNEQKQLFVEQHKHYLDEIIEQISEFSKRVILADANLDKVLSAYNKHRDKPIREQAENIIHLFTLTNLGAPAAFKYFDTTIDRKRYTSTKEVLDATLIHQSITGLYETRIDLSQLGGDSGGSSGGSSGSETPGTSESATPESSGGSSGGSSTATRDKKDTVTREKHPKKPFQKWMKDRAIKKGNYLRFQRLFYLDRGKLAKIILDDIECLSCDIPLSEIYSVFKTRWETTGSFKSLGDFKTYGKADNTAFRELITAKEIEKNVQEMSKGSAPGPDGITLGDVVKMDPEFSRTMEIFNLWLTTGKIPDMVRGCRTVLIPKSSKPDRLKDINNWRPITIGSILLRLFSRIVTARLSKACPLNPRQRGFIRAAGCSENLKLLQTIIWSAKREHRPLGVVFVDIAKAFDTVSHQHIIHALQQREVDPHIVGLVSNMYENISTYITTKRNTHTDKIQIRVGVKQGDPMSPLLFNLAMDPLLCKLEESGKGYHRGQSSITAMAFADDLVLLSDSWENMNTNISILETFCNLTGLKTQGQKCHGFYIKPTKDSYTINDCAAWTINGTPLNMIDPGESEKYLGLQFDPWIGIARSGLSTKLDFWLQRIDQAPLKPLQKTDILKTYTIPRLIYIADHSEVKTALLETLDQKIRTAVKEWLHLPPCTCDAILYSSTRDGGLGITKLAGLIPSVQARRLHRIAQSSDDTMKCFMEKEKMEQLHKKLWIQAGGDRENIPSIWEAPPSSEPPNNVSTNSEWEAPTQKDKFPKPCNWRKNEFKKWTKLASQGRGIVNFERDKISNHWIQYYRRIPHRKLLTALQLRANVYPTREFLARGRQDQYIKACRHCDADIESCAHIIGNCPVTQDARIKRHNYICELLLEEAKKKDWVVFKEPHIRDSNKELYKPDLIFVKDARALVVDVTVRYEAAKSSLEEAAAEKVRKYKHLETEVRHLTNAKDVTFVGFPLGARGKWHQDNFKLLTELGLSKSRQVKMAETFSTVALFSSVDIVHMFASRARKSMVM

SEQ ID NO: 1680 - protein, 2278 aa, synthetic construct
  source 1..2278: note = Description of Artificial Sequence: Synthetic polypeptide
MAPKKKRKVGIHGVPAADKKYSIGLAIGTNSVGWAVITDEYKVPSKKFKVLGNTDRHSIKKNLIGALLFDSGETAEATRLKRTARRRYTRRKNRICYLQEIFSNEMAKVDDSFFHRLEESFLVEEDKKHERHPIFGNIVDEVAYHEKYPTIYHLRKKLVDSTDKADLRLIYLALAHMIKFRGHFLIEGDLNPDNSDVDKLFIQLVQTYNQLFEENPINASGVDAKAILSARLSKSRRLENLIAQLPGEKKNGLFGNLIALSLGLTPNFKSNFDLAEDAKLQLSKDTYDDDLDNLLAQIGDQYADLFLAAKNLSDAILLSDILRVNTEITKAPLSASMIKRYDEHHQDLTLLKALVRQQLPEKYKEIFFDQSKNGYAGYIDGGASQEEFYKFIKPILEKMDGTEELLVKLNREDLLRKQRTFDNGSIPHQIHLGELHAILRRQEDFYPFLKDNREKIEKILTFRIPYYVGPLARGNSRFAWMTRKSEETITPWNFEEVVDKGASAQSFIERMTNFDKNLPNEKVLPKHSLLYEYFTVYNELTKVKYVTEGMRKPAFLSGEQKKAIVDLLFKTNRKVTVKQLKEDYFKKIECFDSVEISGVEDRFNASLGTYHDLLKIIKDKDFLDNEENEDILEDIVLTLTLFEDREMIEERLKTYAHLFDDKVMKQLKRRRYTGWGRLSRKLINGIRDKQSGKTILDFLKSDGFANRNFMQLIHDDSLTFKEDIQKAQVSGQGDSLHEHIANLAGSPAIKKGILQTVKVVDELVKVMGRHKPENIVIEMARENQTTQKGQKNSRERMKRIEEGIKELGSQILKEHPVENTQLQNEKLYLYYLQNGRDMYVDQELDINRLSDYDVDHIVPQSFLKDDSIDNKVLTRSDKNRGKSDNVPSEEVVKKMKNYWRQLLNAKLITQRKFDNLTKAERGGLSELDKAGFIKRQLVETRQITKHVAQILDSRMNTKYDENDKLIREVKVITLKSKLVSDFRKDFQFYKVREINNYHHAHDAYLNAVVGTALIKKYPKLESEFVYGDYKVYDVRKMIAKSEQEIGKATAKYFFYSNIMNFFKTEITLANGEIRKRPLIETNGETGEIVWDKGRDFATVRKVLSMPQVNIVKKTEVQTGGFSKESILPKRNSDKLIARKKDWDPKKYGGFDSPTVAYSVLVVAKVEKGKSKKLKSVKELLGITIMERSSFEKNPIDFLEAKGYKEVKKDLIIKLPKYSLFELENGRKRMLASAGELQKGNELALPSKYVNFLYLASHYEKLKGSPEDNEQKQLFVEQHKHYLDEIIEQISEFSKRVILADANLDKVLSAYNKHRDKPIREQAENIIHLFTLTNLGAPAAFKYFDTTIDRKRYTSTKEVLDATLIHQSITGLYETRIDLSQLGGDSGGSSGGSSGSETPGTSESATPESSGGSSGGSSTATRDKKDTVTREKHPKKPFQKWMKDRAIKKGNYLRFQRLFYLDRGKLAKIILDDIECLSCDIPLSEIYSVFKTRWETTGSFKSLGDFKTYGKADNTAFRELITAKEIEKNVQEMSKGSAPGPDGITLGDVVKMDPEFSRTMEIFNLWLTTGKIPDMVRGCRTVLIPKSSKPDRLKDINNWRPITIGSILLRLFSRIVTARLSKACPLNPRQRGFIRAAGCSENLKLLQTIIWSAKREHRPLGVVFVDIAKAFDTVSHQHIIHALQQREVDPHIVGLVSNMYENISTYITTKRNTHTDKIQIRVGVKQGDPMSPLLFNLAMDPLLCKLEESGKGYHRGQSSITAMAFADDLVLLSDSWENMNTNISILETFCNLTGLKTQGQKCHGFYIKPTKDSYTINDCAAWTINGTPLNMIDPGESEKYLGLQFDPWIGIARSGLSTKLDFWLQRIDQAPLKPLQKTDILKTYTIPRLIYIADHSEVKTALLETLDQKIRTAVKEWLHLPPCTCDAILYSSTRDGGLGITKLAGLIPSVQARRLHRIAQSSDDTMKCFMEKEKMEQLHKKLWIQAGGDRENIPSIWEAPPSSEPPNNVSTNSEWEAPTQKDKFPKPCNWRKNEFKKWTKLASQGRGIVNFERDKISNHWIQYYRRIPHRKLLTALQLRANVYPTREFLARGRQDQYIKACRHCDADIESCAHIIGNCPVTQDARIKRHNYICELLLEEAKKKDWVVFKEPHIRDSNKELYKPDLIFVKDARALVVDVTVRYEAAKSSLEEAAAEKVRKYKHLETEVRHLTNAKDVTFVGFPLGARGKWHQDNFKLLTELGLSKSRQVKMAETFSTVALFSSVDIVHMFASRARKSMVM

SEQ ID NO: 1681 - protein, 2278 aa, synthetic construct
  source 1..2278: note = Description of Artificial Sequence: Synthetic polypeptide
MAPKKKRKVGIHGVPAADKKYSIGLDIGTNSVGWAVITDEYKVPSKKFKVLGNTDRHSIKKNLIGALLFDSGETAEATRLKRTARRRYTRRKNRICYLQEIFSNEMAKVDDSFFHRLEESFLVEEDKKHERHPIFGNIVDEVAYHEKYPTIYHLRKKLVDSTDKADLRLIYLALAHMIKFRGHFLIEGDLNPDNSDVDKLFIQLVQTYNQLFEENPINASGVDAKAILSARLSKSRRLENLIAQLPGEKKNGLFGNLIALSLGLTPNFKSNFDLAEDAKLQLSKDTYDDDLDNLLAQIGDQYADLFLAAKNLSDAILLSDILRVNTEITKAPLSASMIKRYDEHHQDLTLLKALVRQQLPEKYKEIFFDQSKNGYAGYIDGGASQEEFYKFIKPILEKMDGTEELLVKLNREDLLRKQRTFDNGSIPHQIHLGELHAILRRQEDFYPFLKDNREKIEKILTFRIPYYVGPLARGNSRFAWMTRKSEETITPWNFEEVVDKGASAQSFIERMTNFDKNLPNEKVLPKHSLLYEYFTVYNELTKVKYVTEGMRKPAFLSGEQKKAIVDLLFKTNRKVTVKQLKEDYFKKIECFDSVEISGVEDRFNASLGTYHDLLKIIKDKDFLDNEENEDILEDIVLTLTLFEDREMIEERLKTYAHLFDDKVMKQLKRRRYTGWGRLSRKLINGIRDKQSGKTILDFLKSDGFANRNFMQLIHDDSLTFKEDIQKAQVSGQGDSLHEHIANLAGSPAIKKGILQTVKVVDELVKVMGRHKPENIVIEMARENQTTQKGQKNSRERMKRIEEGIKELGSQILKEHPVENTQLQNEKLYLYYLQNGRDMYVDQELDINRLSDYDVDHIVPQSFLKDDSIDNKVLTRSDKARGKSDNVPSEEVVKKMKNYWRQLLNAKLITQRKFDNLTKAERGGLSELDKAGFIKRQLVETRQITKHVAQILDSRMNTKYDENDKLIREVKVITLKSKLVSDFRKDFQFYKVREINNYHHAHDAYLNAVVGTALIKKYPKLESEFVYGDYKVYDVRKMIAKSEQEIGKATAKYFFYSNIMNFFKTEITLANGEIRKRPLIETNGETGEIVWDKGRDFATVRKVLSMPQVNIVKKTEVQTGGFSKESILPKRNSDKLIARKKDWDPKKYGGFDSPTVAYSVLVVAKVEKGKSKKLKSVKELLGITIMERSSFEKNPIDFLEAKGYKEVKKDLIIKLPKYSLFELENGRKRMLASAGELQKGNELALPSKYVNFLYLASHYEKLKGSPEDNEQKQLFVEQHKHYLDEIIEQISEFSKRVILADANLDKVLSAYNKHRDKPIREQAENIIHLFTLTNLGAPAAFKYFDTTIDRKRYTSTKEVLDATLIHQSITGLYETRIDLSQLGGDSGGSSGGSSGSETPGTSESATPESSGGSSGGSSTATRDKKDTVTREKHPKKPFQKWMKDRAIKKGNYLRFQRLFYLDRGKLAKIILDDIECLSCDIPLSEIYSVFKTRWETTGSFKSLGDFKTYGKADNTAFRELITAKEIEKNVQEMSKGSAPGPDGITLGDVVKMDPEFSRTMEIFNLWLTTGKIPDMVRGCRTVLIPKSSKPDRLKDINNWRPITIGSILLRLFSRIVTARLSKACPLNPRQRGFIRAAGCSENLKLLQTIIWSAKREHRPLGVVFVDIAKAFDTVSHQHIIHALQQREVDPHIVGLVSNMYENISTYITTKRNTHTDKIQIRVGVKQGDPMSPLLFNLAMDPLLCKLEESGKGYHRGQSSITAMAFADDLVLLSDSWENMNTNISILETFCNLTGLKTQGQKCHGFYIKPTKDSYTINDCAAWTINGTPLNMIDPGESEKYLGLQFDPWIGIARSGLSTKLDFWLQRIDQAPLKPLQKTDILKTYTIPRLIYIADHSEVKTALLETLDQKIRTAVKEWLHLPPCTCDAILYSSTRDGGLGITKLAGLIPSVQARRLHRIAQSSDDTMKCFMEKEKMEQLHKKLWIQAGGDRENIPSIWEAPPSSEPPNNVSTNSEWEAPTQKDKFPKPCNWRKNEFKKWTKLASQGRGIVNFERDKISNHWIQYYRRIPHRKLLTALQLRANVYPTREFLARGRQDQYIKACRHCDADIESCAHIIGNCPVTQDARIKRHNYICELLLEEAKKKDWVVFKEPHIRDSNKELYKPDLIFVKDARALVVDVTVRYEAAKSSLEEAAAEKVRKYKHLETEVRHLTNAKDVTFVGFPLGARGKWHQDNFKLLTELGLSKSRQVKMAETFSTVALFSSVDIVHMFASRARKSMVM

SEQ ID NO: 1682 - protein, 2278 aa, synthetic construct
  source 1..2278: note = Description of Artificial Sequence: Synthetic polypeptide
MAPKKKRKVGIHGVPAADKKYSIGLAIGTNSVGWAVITDEYKVPSKKFKVLGNTDRHSIKKNLIGALLFDSGETAEATRLKRTARRRYTRRKNRICYLQEIFSNEMAKVDDSFFHRLEESFLVEEDKKHERHPIFGNIVDEVAYHEKYPTIYHLRKKLVDSTDKADLRLIYLALAHMIKFRGHFLIEGDLNPDNSDVDKLFIQLVQTYNQLFEENPINASGVDAKAILSARLSKSRRLENLIAQLPGEKKNGLFGNLIALSLGLTPNFKSNFDLAEDAKLQLSKDTYDDDLDNLLAQIGDQYADLFLAAKNLSDAILLSDILRVNTEITKAPLSASMIKRYDEHHQDLTLLKALVRQQLPEKYKEIFFDQSKNGYAGYIDGGASQEEFYKFIKPILEKMDGTEELLVKLNREDLLRKQRTFDNGSIPHQIHLGELHAILRRQEDFYPFLKDNREKIEKILTFRIPYYVGPLARGNSRFAWMTRKSEETITPWNFEEVVDKGASAQSFIERMTNFDKNLPNEKVLPKHSLLYEYFTVYNELTKVKYVTEGMRKPAFLSGEQKKAIVDLLFKTNRKVTVKQLKEDYFKKIECFDSVEISGVEDRFNASLGTYHDLLKIIKDKDFLDNEENEDILEDIVLTLTLFEDREMIEERLKTYAHLFDDKVMKQLKRRRYTGWGRLSRKLINGIRDKQSGKTILDFLKSDGFANRNFMQLIHDDSLTFKEDIQKAQVSGQGDSLHEHIANLAGSPAIKKGILQTVKVVDELVKVMGRHKPENIVIEMARENQTTQKGQKNSRERMKRIEEGIKELGSQILKEHPVENTQLQNEKLYLYYLQNGRDMYVDQELDINRLSDYDVDHIVPQSFLKDDSIDNKVLTRSDKNRGKSDNVPSEEVVKKMKNYWRQLLNAKLITQRKFDNLTKAERGGLSELDKAGFIKRQLVETRQITKHVAQILDSRMNTKYDENDKLIREVKVITLKSKLVSDFRKDFQFYKVREINNYHHAHDAYLNAVVGTALIKKYPKLESEFVYGDYKVYDVRKMIAKSEQEIGKATAKYFFYSNIMNFFKTEITLANGEIRKRPLIETNGETGEIVWDKGRDFATVRKVLSMPQVNIVKKTEVQTGGFSKESILPKRNSDKLIARKKDWDPKKYGGFDSPTVAYSVLVVAKVEKGKSKKLKSVKELLGITIMERSSFEKNPIDFLEAKGYKEVKKDLIIKLPKYSLFELENGRKRMLASAGELQKGNELALPSKYVNFLYLASHYEKLKGSPEDNEQKQLFVEQHKHYLDEIIEQISEFSKRVILADANLDKVLSAYNKHRDKPIREQAENIIHLFTLTNLGAPAAFKYFDTTIDRKRYTSTKEVLDATLIHQSITGLYETRIDLSQLGGDSGGSSGGSSGSETPGTSESATPESSGGSSGGSSTATRDKKDTVTREKHPKKPFQKWMKDRAIKKGNYLRFQRLFYLDRGKLAKIILDDIECLSCDIPLSEIYSVFKTRWETTGSFKSLGDFKTYGKADNTAFRELITAKEIEKNVQEMSKGSAPGPDGITLGDVVKMDPEFSRTMEIFNLWLTTGKIPDMVRGCRTVLIPKSSKPDRLKDINNWRPITIGSILLRLFSRIVTARLSKACPLNPRQRGFIRAAGCSENLKLLQTIIWSAKREHRPLGVVFVDIAKAFDTVSHQHIIHALQQREVDPHIVGLVSNMYENISTYITTKRNTHTDKIQIRVGVKQGDPMSPLLFNLAMDPLLCKLEESGKGYHRGQSSITAMAFADDLVLLSDSWENMNTNISILETFCNLTGLKTQGQKCHGFYIKPTKDSYTINDCAAWTINGTPLNMIDPGESEKYLGLQFDPWIGIARSGLSTKLDFWLQRIDQAPLKPLQKTDILKTYTIPRLIYIADHSEVKTALLETLDQKIRTAVKEWLHLPPCTCDAILYSSTRDGGLGITKLAGLIPSVQARRLHRIAQSSDDTMKCFMEKEKMEQLHKKLWIQAGGDRENIPSIWEAPPSSEPPNNVSTNSEWEAPTQKDKFPKPCNWRKNEFKKWTKLASQGRGIVNFERDKISNHWIQYYRRIPHRKLLTALQLRANVYPTREFLARGRQDQYIKACRHCDADIESCAHIIGNCPVTQDARIKRHNYICELLLEEAKKKDWVVFKEPHIRDSNKELYKPALIFVKDARALVVDVTVRYEAAKSSLEEAAAEKVRKYKHLETEVRHLTNAKDVTFVGFPLGARGKWHQDNFKLLTELGLSKSRQVKMAETFSTVALFSSVDIVHMFASRARKSMVM

SEQ ID NO: 1683 - protein, 2278 aa, synthetic construct
  source 1..2278: note = Description of Artificial Sequence: Synthetic polypeptide
MAPKKKRKVGIHGVPAADKKYSIGLDIGTNSVGWAVITDEYKVPSKKFKVLGNTDRHSIKKNLIGALLFDSGETAEATRLKRTARRRYTRRKNRICYLQEIFSNEMAKVDDSFFHRLEESFLVEEDKKHERHPIFGNIVDEVAYHEKYPTIYHLRKKLVDSTDKADLRLIYLALAHMIKFRGHFLIEGDLNPDNSDVDKLFIQLVQTYNQLFEENPINASGVDAKAILSARLSKSRRLENLIAQLPGEKKNGLFGNLIALSLGLTPNFKSNFDLAEDAKLQLSKDTYDDDLDNLLAQIGDQYADLFLAAKNLSDAILLSDILRVNTEITKAPLSASMIKRYDEHHQDLTLLKALVRQQLPEKYKEIFFDQSKNGYAGYIDGGASQEEFYKFIKPILEKMDGTEELLVKLNREDLLRKQRTFDNGSIPHQIHLGELHAILRRQEDFYPFLKDNREKIEKILTFRIPYYVGPLARGNSRFAWMTRKSEETITPWNFEEVVDKGASAQSFIERMTNFDKNLPNEKVLPKHSLLYEYFTVYNELTKVKYVTEGMRKPAFLSGEQKKAIVDLLFKTNRKVTVKQLKEDYFKKIECFDSVEISGVEDRFNASLGTYHDLLKIIKDKDFLDNEENEDILEDIVLTLTLFEDREMIEERLKTYAHLFDDKVMKQLKRRRYTGWGRLSRKLINGIRDKQSGKTILDFLKSDGFANRNFMQLIHDDSLTFKEDIQKAQVSGQGDSLHEHIANLAGSPAIKKGILQTVKVVDELVKVMGRHKPENIVIEMARENQTTQKGQKNSRERMKRIEEGIKELGSQILKEHPVENTQLQNEKLYLYYLQNGRDMYVDQELDINRLSDYDVDHIVPQSFLKDDSIDNKVLTRSDKARGKSDNVPSEEVVKKMKNYWRQLLNAKLITQRKFDNLTKAERGGLSELDKAGFIKRQLVETRQITKHVAQILDSRMNTKYDENDKLIREVKVITLKSKLVSDFRKDFQFYKVREINNYHHAHDAYLNAVVGTALIKKYPKLESEFVYGDYKVYDVRKMIAKSEQEIGKATAKYFFYSNIMNFFKTEITLANGEIRKRPLIETNGETGEIVWDKGRDFATVRKVLSMPQVNIVKKTEVQTGGFSKESILPKRNSDKLIARKKDWDPKKYGGFDSPTVAYSVLVVAKVEKGKSKKLKSVKELLGITIMERSSFEKNPIDFLEAKGYKEVKKDLIIKLPKYSLFELENGRKRMLASAGELQKGNELALPSKYVNFLYLASHYEKLKGSPEDNEQKQLFVEQHKHYLDEIIEQISEFSKRVILADANLDKVLSAYNKHRDKPIREQAENIIHLFTLTNLGAPAAFKYFDTTIDRKRYTSTKEVLDATLIHQSITGLYETRIDLSQLGGDSGGSSGGSSGSETPGTSESATPESSGGSSGGSSTATRDKKDTVTREKHPKKPFQKWMKDRAIKKGNYLRFQRLFYLDRGKLAKIILDDIECLSCDIPLSEIYSVFKTRWETTGSFKSLGDFKTYGKADNTAFRELITAKEIEKNVQEMSKGSAPGPDGITLGDVVKMDPEFSRTMEIFNLWLTTGKIPDMVRGCRTVLIPKSSKPDRLKDINNWRPITIGSILLRLFSRIVTARLSKACPLNPRQRGFIRAAGCSENLKLLQTIIWSAKREHRPLGVVFVDIAKAFDTVSHQHIIHALQQREVDPHIVGLVSNMYENISTYITTKRNTHTDKIQIRVGVKQGDPMSPLLFNLAMDPLLCKLEESGKGYHRGQSSITAMAFADDLVLLSDSWENMNTNISILETFCNLTGLKTQGQKCHGFYIKPTKDSYTINDCAAWTINGTPLNMIDPGESEKYLGLQFDPWIGIARSGLSTKLDFWLQRIDQAPLKPLQKTDILKTYTIPRLIYIADHSEVKTALLETLDQKIRTAVKEWLHLPPCTCDAILYSSTRDGGLGITKLAGLIPSVQARRLHRIAQSSDDTMKCFMEKEKMEQLHKKLWIQAGGDRENIPSIWEAPPSSEPPNNVSTNSEWEAPTQKDKFPKPCNWRKNEFKKWTKLASQGRGIVNFERDKISNHWIQYYRRIPHRKLLTALQLRANVYPTREFLARGRQDQYIKACRHCDADIESCAHIIGNCPVTQDARIKRHNYICELLLEEAKKKDWVVFKEPHIRDSNKELYKPALIFVKDARALVVDVTVRYEAAKSSLEEAAAEKVRKYKHLETEVRHLTNAKDVTFVGFPLGARGKWHQDNFKLLTELGLSKSRQVKMAETFSTVALFSSVDIVHMFASRARKSMVM

SEQ ID NO: 1684 - protein, 2278 aa, synthetic construct
  source 1..2278: note = Description of Artificial Sequence: Synthetic polypeptide
MAPKKKRKVGIHGVPAADKKYSIGLDIGTNSVGWAVITDEYKVPSKKFKVLGNTDRHSIKKNLIGALLFDSGETAEATRLKRTARRRYTRRKNRICYLQEIFSNEMAKVDDSFFHRLEESFLVEEDKKHERHPIFGNIVDEVAYHEKYPTIYHLRKKLVDSTDKADLRLIYLALAHMIKFRGHFLIEGDLNPDNSDVDKLFIQLVQTYNQLFEENPINASGVDAKAILSARLSKSRRLENLIAQLPGEKKNGLFGNLIALSLGLTPNFKSNFDLAEDAKLQLSKDTYDDDLDNLLAQIGDQYADLFLAAKNLSDAILLSDILRVNTEITKAPLSASMIKRYDEHHQDLTLLKALVRQQLPEKYKEIFFDQSKNGYAGYIDGGASQEEFYKFIKPILEKMDGTEELLVKLNREDLLRKQRTFDNGSIPHQIHLGELHAILRRQEDFYPFLKDNREKIEKILTFRIPYYVGPLARGNSRFAWMTRKSEETITPWNFEEVVDKGASAQSFIERMTNFDKNLPNEKVLPKHSLLYEYFTVYNELTKVKYVTEGMRKPAFLSGEQKKAIVDLLFKTNRKVTVKQLKEDYFKKIECFDSVEISGVEDRFNASLGTYHDLLKIIKDKDFLDNEENEDILEDIVLTLTLFEDREMIEERLKTYAHLFDDKVMKQLKRRRYTGWGRLSRKLINGIRDKQSGKTILDFLKSDGFANRNFMQLIHDDSLTFKEDIQKAQVSGQGDSLHEHIANLAGSPAIKKGILQTVKVVDELVKVMGRHKPENIVIEMARENQTTQKGQKNSRERMKRIEEGIKELGSQILKEHPVENTQLQNEKLYLYYLQNGRDMYVDQELDINRLSDYDVDHIVPQSFLKDDSIDNKVLTRSDKNRGKSDNVPSEEVVKKMKNYWRQLLNAKLITQRKFDNLTKAERGGLSELDKAGFIKRQLVETRQITKHVAQILDSRMNTKYDENDKLIREVKVITLKSKLVSDFRKDFQFYKVREINNYHHAHDAYLNAVVGTALIKKYPKLESEFVYGDYKVYDVRKMIAKSEQEIGKATAKYFFYSNIMNFFKTEITLANGEIRKRPLIETNGETGEIVWDKGRDFATVRKVLSMPQVNIVKKTEVQTGGFSKESILPKRNSDKLIARKKDWDPKKYGGFDSPTVAYSVLVVAKVEKGKSKKLKSVKELLGITIMERSSFEKNPIDFLEAKGYKEVKKDLIIKLPKYSLFELENGRKRMLASAGELQKGNELALPSKYVNFLYLASHYEKLKGSPEDNEQKQLFVEQHKHYLDEIIEQISEFSKRVILADANLDKVLSAYNKHRDKPIREQAENIIHLFTLTNLGAPAAFKYFDTTIDRKRYTSTKEVLDATLIHQSITGLYETRIDLSQLGGDSGGSSGGSSGSETPGTSESATPESSGGSSGGSSTATRDKKDTVTREKHPKKPFQKWMKDRAIKKGNYLRFQRLFYLDRGKLAKIILDDIECLSCDIPLSEIYSVFKTRWETTGSFKSLGDFKTYGKADNTAFRELITAKEIEKNVQEMSKGSAPGPDGITLGDVVKMDPEFSRTMEIFNLWLTTGKIPDMVRGCRTVLIPKSSKPDRLKDINNWRPITIGSILLRLFSRIVTARLSKACPLNPRQRGFIRAAGCSENLKLLQTIIWSAKREHRPLGVVFVDIAKAFDTVSHQHIIHALQQREVDPHIVGLVSNMYENISTYITTKRNTHTDKIQIRVGVKQGDPMSPLLFNLAMDPLLCKLEESGKGYHRGQSSITAMAFADDLVLLSDSWENMNTNISILETFCNLTGLKTQGQKCHGFYIKPTKDSYTINDCAAWTINGTPLNMIDPGESEKYLGLQFDPWIGIARSGLSTKLDFWLQRIDQAPLKPLQKTDILKTYTIPRLIYIADHSEVKTALLETLDQKIRTAVKEWLHLPPCTCDAILYSSTRDGGLGITKLAGLIPSVQARRLHRIAQSSDDTMKCFMEKEKMEQLHKKLWIQAGGDRENIPSIWEAPPSSEPPNNVSTNSEWEAPTQKDKFPKPCNWRKNEFKKWTKLASQGRGIVNFERDKISNHWIQYYRRIPHRKLLTALQLRANVYPTREFLARGRQDQYIKACRHCDADIESCAHIIGNCPVTQDARIKRHNYICELLLEEAKKKDWVVFKEPHIRDSNKELYKPALIFVKDARALVVDVTVRYEAAKSSLEEAAAEKVRKYKHLETEVRHLTNAKDVTFVGFPLGARGKWHQDNFKLLTELGLSKSRQVKMAETFSTVALFSSVDIVHMFASRARKSMVM

SEQ ID NO: 1685 - protein, 27 aa, unidentified
  source 1..27: note = Description of Unknown: R2Tg NoLS sequence
APTQKDKFPKPCNWRKNEFKKWTKLAS

SEQ ID NO: 1686 - protein, 27 aa, synthetic construct
  source 1..27: note = Description of Artificial Sequence: Synthetic peptide
APTQADAFPAPCNWRANEFAAWTALAS

SEQ ID NO: 1687 - RNA, 100 nt, synthetic construct
  source 1..100: mol_type = other RNA; note = Description of Artificial Sequence: Synthetic polynucleotide
  misc_difference 1..100: note = This sequence may encompass 96-100 nucleotides
aaaaaaaaaaaaaaaaaaaaaaaaaaaaaaaaaaaaaaaaaaaaaaaaaaaaaaaaaaaaaaaaaaaaaaaaaaaaaaaaaaaaaaaaaaaaaaaaaaaa

SEQ ID NO: 1688 - RNA, 23 nt, unidentified
  source 1..23: mol_type = unassigned RNA; note = Description of Unknown: miR-142 sequence
tgtagtgtttcctactttatgga

SEQ ID NO: 1689 - DNA, 133 bp, synthetic construct; identical to SEQ ID NO: 1624
  source 1..133: mol_type = other DNA; note = Description of Artificial Sequence: Synthetic polynucleotide

SEQ ID NO: 1690 - DNA, 188 bp, synthetic construct
  source 1..188: mol_type = other DNA; note = Description of Artificial Sequence: Synthetic polynucleotide
ggcggctgaggaagctgagggttttagagctagaaatagcaagttaaaataaggctagtccgttatcaacttgaaaaagtgggaccgagtcggtccagtccctcaagtccttccagcagcagcagcagcagcagcagcagcagccgccaccgccgccgccgccgccgccgcctcctcagcttcctcag

SEQ ID NO: 1691 - DNA, 20 bp, synthetic construct
  source 1..20: mol_type = other DNA; note = Description of Artificial Sequence: Synthetic oligonucleotide
ggggccactagggacaggat

SEQ ID NO: 1692 - DNA, 12 bp, synthetic construct
  source 1..12: mol_type = other DNA; note = Description of Artificial Sequence: Synthetic oligonucleotide
ctgtccctagtg

SEQ ID NO: 1693 - DNA, 20 bp, synthetic construct
  source 1..20: mol_type = other DNA; note = Description of Artificial Sequence: Synthetic oligonucleotide
agagagatggctccaggaaa

SEQ ID NO: 1694 - DNA, 20 bp, synthetic construct
  source 1..20: mol_type = other DNA; note = Description of Artificial Sequence: Synthetic oligonucleotide
tcagggttctggatatctgt

SEQ ID NO: 1695 - DNA, 20 bp, synthetic construct
  source 1..20: mol_type = other DNA; note = Description of Artificial Sequence: Synthetic oligonucleotide
actccagtctttctagaaga

SEQ ID NO: 1696 - protein, 4 aa, unidentified
  source 1..4: note = Description of Unknown: spCas9 binding domain sequence
VRQR

SEQ ID NO: 1697 - protein, 4 aa, unidentified
  source 1..4: note = Description of Unknown: spCas9 binding domain sequence
VRER

SEQ ID NO: 1698 - protein, 6 aa, unidentified
  source 1..6: note = Description of Unknown: spCas9 binding domain sequence
MQKSER

SEQ ID NO: 1699 - protein, 6 aa, unidentified
  source 1..6: note = Description of Unknown: spCas9 binding domain sequence
LRKIQK

SEQ ID NO: 1700 - protein, 6 aa, unidentified
  source 1..6: note = Description of Unknown: spCas9 binding domain sequence
LRVSQL

SEQ ID NO: 1701 - skipped

SEQ ID NO: 1702 - protein, 6 aa, synthetic construct
  source 1..6: note = Description of Artificial Sequence: Synthetic peptide
GGSGGS

SEQ ID NO: 1703 - protein, 9 aa, synthetic construct
  source 1..9: note = Description of Artificial Sequence: Synthetic peptide
GGSGGSGGS

SEQ ID NO: 1704 - protein, 12 aa, synthetic construct
  source 1..12: note = Description of Artificial Sequence: Synthetic peptide
GGSGGSGGSGGS

SEQ ID NO: 1705 - protein, 15 aa, synthetic construct
  source 1..15: note = Description of Artificial Sequence: Synthetic peptide
GGSGGSGGSGGSGGS

SEQ ID NO: 1706 - protein, 18 aa, synthetic construct
  source 1..18: note = Description of Artificial Sequence: Synthetic peptide
GGSGGSGGSGGSGGSGGS

SEQ ID NO: 1707 - protein, 5 aa, synthetic construct
  source 1..5: note = Description of Artificial Sequence: Synthetic peptide
GGGGS

SEQ ID NO: 1708 - protein, 10 aa, synthetic construct
  source 1..10: note = Description of Artificial Sequence: Synthetic peptide
GGGGSGGGGS

SEQ ID NO: 1709 - protein, 15 aa, synthetic construct
  source 1..15: note = Description of Artificial Sequence: Synthetic peptide
GGGGSGGGGSGGGGS

SEQ ID NO: 1710 - protein, 20 aa, synthetic construct
  source 1..20: note = Description of Artificial Sequence: Synthetic peptide
GGGGSGGGGSGGGGSGGGGS

SEQ ID NO: 1711 - protein, 25 aa, synthetic construct
  source 1..25: note = Description of Artificial Sequence: Synthetic peptide
GGGGSGGGGSGGGGSGGGGSGGGGS

SEQ ID NO: 1712 - protein, 30 aa, synthetic construct
  source 1..30: note = Description of Artificial Sequence: Synthetic polypeptide
GGGGSGGGGSGGGGSGGGGSGGGGSGGGGS

SEQ ID NO: 1713 - skipped

SEQ ID NO: 1714 - protein, 4 aa, synthetic construct
  source 1..4: note = Description of Artificial Sequence: Synthetic peptide
GGGG

SEQ ID NO: 1715 - protein, 5 aa, synthetic construct
  source 1..5: note = Description of Artificial Sequence: Synthetic peptide
GGGGG

SEQ ID NO: 1716 - protein, 6 aa, synthetic construct
  source 1..6: note = Description of Artificial Sequence: Synthetic peptide
GGGGGG

SEQ ID NO: 1717 - protein, 7 aa, synthetic construct
  source 1..7: note = Description of Artificial Sequence: Synthetic peptide
GGGGGGG

SEQ ID NO: 1718 - protein, 8 aa, synthetic construct
  source 1..8: note = Description of Artificial Sequence: Synthetic peptide
GGGGGGGG

SEQ ID NO: 1719 - skipped

SEQ ID NO: 1720 - protein, 6 aa, synthetic construct
  source 1..6: note = Description of Artificial Sequence: Synthetic peptide
GSSGSS

SEQ ID NO: 1721 - protein, 9 aa, synthetic construct
  source 1..9: note = Description of Artificial Sequence: Synthetic peptide
GSSGSSGSS

SEQ ID NO: 1722 - protein, 12 aa, synthetic construct
  source 1..12: note = Description of Artificial Sequence: Synthetic peptide
GSSGSSGSSGSS

SEQ ID NO: 1723 - protein, 15 aa, synthetic construct
  source 1..15: note = Description of Artificial Sequence: Synthetic peptide
GSSGSSGSSGSSGSS

SEQ ID NO: 1724 - protein, 18 aa, synthetic construct
  source 1..18: note = Description of Artificial Sequence: Synthetic peptide
GSSGSSGSSGSSGSSGSS

SEQ ID NO: 1725 - protein, 5 aa, synthetic construct
  source 1..5: note = Description of Artificial Sequence: Synthetic peptide
EAAAK

SEQ ID NO: 1726 - protein, 10 aa, synthetic construct
  source 1..10: note = Description of Artificial Sequence: Synthetic peptide
EAAAKEAAAK

SEQ ID NO: 1727 - protein, 15 aa, synthetic construct
  source 1..15: note = Description of Artificial Sequence: Synthetic peptide
EAAAKEAAAKEAAAK

SEQ ID NO: 1728 - protein, 20 aa, synthetic construct
  source 1..20: note = Description of Artificial Sequence: Synthetic peptide
EAAAKEAAAKEAAAKEAAAK

SEQ ID NO: 1729 - protein, 25 aa, synthetic construct
  source 1..25: note = Description of Artificial Sequence: Synthetic peptide
EAAAKEAAAKEAAAKEAAAKEAAAK

SEQ ID NO: 1730 - protein, 30 aa, synthetic construct
  source 1..30: note = Description of Artificial Sequence: Synthetic polypeptide
EAAAKEAAAKEAAAKEAAAKEAAAKEAAAK

SEQ ID NO: 1731 - skipped

SEQ ID NO: 1732 - protein, 5 aa, synthetic construct
  source 1..5: note = Description of Artificial Sequence: Synthetic peptide
PAPAP

SEQ ID NO: 1733 - protein, 7 aa, synthetic construct
  source 1..7: note = Description of Artificial Sequence: Synthetic peptide
PAPAPAP

SEQ ID NO: 1734 - protein, 9 aa, synthetic construct
  source 1..9: note = Description of Artificial Sequence: Synthetic peptide
PAPAPAPAP

SEQ ID NO: 1735 - protein, 11 aa, synthetic construct
  source 1..11: note = Description of Artificial Sequence: Synthetic peptide
PAPAPAPAPAP

SEQ ID NO: 1736 - protein, 13 aa, synthetic construct
  source 1..13: note = Description of Artificial Sequence: Synthetic peptide
PAPAPAPAPAPAP

SEQ ID NO: 1737 - protein, 6 aa, synthetic construct
  source 1..6: note = Description of Artificial Sequence: Synthetic peptide
GGSGGG

SEQ ID NO: 1738 - protein, 6 aa, synthetic construct
  source 1..6: note = Description of Artificial Sequence: Synthetic peptide
GGGGGS

SEQ ID NO: 1739 - protein, 6 aa, synthetic construct
  source 1..6: note = Description of Artificial Sequence: Synthetic peptide
GGSGSS

SEQ ID NO: 1740 - protein, 6 aa, synthetic construct
  source 1..6: note = Description of Artificial Sequence: Synthetic peptide
GSSGGS

SEQ ID NO: 1741 - protein, 8 aa, synthetic construct
  source 1..8: note = Description of Artificial Sequence: Synthetic peptide
GGSEAAAK

SEQ ID NO: 1742 - protein, 8 aa, synthetic construct
  source 1..8: note = Description of Artificial Sequence: Synthetic peptide
EAAAKGGS

SEQ ID NO: 1743 - protein, 6 aa, synthetic construct
  source 1..6: note = Description of Artificial Sequence: Synthetic peptide
GGSPAP

SEQ ID NO: 1744 - protein, 6 aa, synthetic construct
  source 1..6: note = Description of Artificial Sequence: Synthetic peptide
PAPGGS

SEQ ID NO: 1745 - protein, 6 aa, synthetic construct
  source 1..6: note = Description of Artificial Sequence: Synthetic peptide
GGGGSS

SEQ ID NO: 1746 - protein, 6 aa, synthetic construct
  source 1..6: note = Description of Artificial Sequence: Synthetic peptide
GSSGGG

SEQ ID NO: 1747 - protein, 8 aa, synthetic construct
  source 1..8: note = Description of Artificial Sequence: Synthetic peptide
GGGEAAAK

SEQ ID NO: 1748 - protein, 8 aa, synthetic construct
  source 1..8: note = Description of Artificial Sequence: Synthetic peptide
EAAAKGGG

SEQ ID NO: 1749 - protein, 6 aa, synthetic construct
  source 1..6: note = Description of Artificial Sequence: Synthetic peptide
GGGPAP

SEQ ID NO: 1750 - protein, 6 aa, synthetic construct
  source 1..6: note = Description of Artificial Sequence: Synthetic peptide
PAPGGG

SEQ ID NO: 1751 - protein, 8 aa, synthetic construct
  source 1..8: note = Description of Artificial Sequence: Synthetic peptide
GSSEAAAK

SEQ ID NO: 1752 - protein, 8 aa, synthetic construct
  source 1..8: note = Description of Artificial Sequence: Synthetic peptide
EAAAKGSS

SEQ ID NO: 1753 - protein, 6 aa, synthetic construct
  source 1..6: note = Description of Artificial Sequence: Synthetic peptide
GSSPAP

SEQ ID NO: 1754 - protein, 6 aa, synthetic construct
  source 1..6: note = Description of Artificial Sequence: Synthetic peptide
PAPGSS

SEQ ID NO: 1755 - protein, 8 aa, synthetic construct
  source 1..8: note = Description of Artificial Sequence: Synthetic peptide
EAAAKPAP

SEQ ID NO: 1756 - protein, 8 aa, synthetic construct
  source 1..8: note = Description of Artificial Sequence: Synthetic peptide
PAPEAAAK

SEQ ID NO: 1757 - protein, 9 aa, synthetic construct
  source 1..9: note = Description of Artificial Sequence: Synthetic peptide
GGSGGGGSS

SEQ ID NO: 1758 - protein, 9 aa, synthetic construct
  source 1..9: note = Description of Artificial Sequence: Synthetic peptide
GGSGSSGGG

SEQ ID NO: 1759 - protein, 9 aa, synthetic construct
  source 1..9: note = Description of Artificial Sequence: Synthetic peptide
GGGGGSGSS

SEQ ID NO: 1760 - protein, 9 aa, synthetic construct
  source 1..9: note = Description of Artificial Sequence: Synthetic peptide
GGGGSSGGS

SEQ ID NO: 1761 - protein, 9 aa, synthetic construct
  source 1..9: note = Description of Artificial Sequence: Synthetic peptide
GSSGGSGGG

SEQ ID NO: 1762 - protein, 9 aa, synthetic construct
  source 1..9: note = Description of Artificial Sequence: Synthetic peptide
GSSGGGGGS

SEQ ID NO: 1763 - protein, 11 aa, synthetic construct
  source 1..11: note = Description of Artificial Sequence: Synthetic peptide
GGSGGGEAAAK

SEQ ID NO: 1764 - protein, 11 aa, synthetic construct
  source 1..11: note = Description of Artificial Sequence: Synthetic peptide
GGSEAAAKGGG

SEQ ID NO: 1765 - protein, 11 aa, synthetic construct
  source 1..11: note = Description of Artificial Sequence: Synthetic peptide
GGGGGSEAAAK

SEQ ID NO: 1766 - protein, 11 aa, synthetic construct
  source 1..11: note = Description of Artificial Sequence: Synthetic peptide
GGGEAAAKGGS

SEQ ID NO: 1767 - protein, 11 aa, synthetic construct
  source 1..11: note = Description of Artificial Sequence: Synthetic peptide
EAAAKGGSGGG

SEQ ID NO: 1768 - protein, 11 aa, synthetic construct
  source 1..11: note = Description of Artificial Sequence: Synthetic peptide
EAAAKGGGGGS

SEQ ID NO: 1769 - protein, 9 aa, synthetic construct
  source 1..9: note = Description of Artificial Sequence: Synthetic peptide
GGSGGGPAP

SEQ ID NO: 1770 - protein, 9 aa, synthetic construct
  source 1..9: note = Description of Artificial Sequence: Synthetic peptide
GGSPAPGGG

SEQ ID NO: 1771 - protein, 9 aa, synthetic construct
  source 1..9: note = Description of Artificial Sequence: Synthetic peptide
GGGGGSPAP

SEQ ID NO: 1772 - protein, 9 aa, synthetic construct
  source 1..9: note = Description of Artificial Sequence: Synthetic peptide
GGGPAPGGS

SEQ ID NO: 1773 - protein, 9 aa, synthetic construct
  source 1..9: note = Description of Artificial Sequence: Synthetic peptide
PAPGGSGGG

SEQ ID NO: 1774 - protein, 9 aa, synthetic construct
  source 1..9: note = Description of Artificial Sequence: Synthetic peptide
PAPGGGGGS

SEQ ID NO: 1775 - protein, 11 aa, synthetic construct
  source 1..11: note = Description of Artificial Sequence: Synthetic peptide
GGSGSSEAAAK

SEQ ID NO: 1776 - protein, 11 aa, synthetic construct
  source 1..11: note = Description of Artificial Sequence: Synthetic peptide
GGSEAAAKGSS

SEQ ID NO: 1777 - protein, 11 aa, synthetic construct
  source 1..11: note = Description of Artificial Sequence: Synthetic peptide
GSSGGSEAAAK

SEQ ID NO: 1778 - protein, 11 aa, synthetic construct
  source 1..11: note = Description of Artificial Sequence: Synthetic peptide
GSSEAAAKGGS

SEQ ID NO: 1779 - protein, 11 aa, synthetic construct
  source 1..11: note = Description of Artificial Sequence: Synthetic peptide
EAAAKGGSGSS

SEQ ID NO: 1780 - protein, 11 aa, synthetic construct
  source 1..11: note = Description of Artificial Sequence: Synthetic peptide
EAAAKGSSGGS

SEQ ID NO: 1781 - protein, 9 aa, synthetic construct
  source 1..9: note = Description of Artificial Sequence: Synthetic peptide
GGSGSSPAP

SEQ ID NO: 1782 - protein, 9 aa, synthetic construct
  source 1..9: note = Description of Artificial Sequence: Synthetic peptide
GGSPAPGSS

SEQ ID NO: 1783 - protein, 9 aa, synthetic construct
  source 1..9: note = Description of Artificial Sequence: Synthetic peptide
GSSGGSPAP

SEQ ID NO: 1784 - protein, 9 aa, synthetic construct
  source 1..9: note = Description of Artificial Sequence: Synthetic peptide
GSSPAPGGS

SEQ ID NO: 1785 - protein, 9 aa, synthetic construct
  source 1..9: note = Description of Artificial Sequence: Synthetic peptide
PAPGGSGSS

SEQ ID NO: 1786 - protein, 9 aa, synthetic construct
  source 1..9: note = Description of Artificial Sequence: Synthetic peptide
PAPGSSGGS

SEQ ID NO: 1787 - protein, 11 aa, synthetic construct
  source 1..11: note = Description of Artificial Sequence: Synthetic peptide
GGSEAAAKPAP

SEQ ID NO: 1788 - protein, 11 aa, synthetic construct
  source 1..11: note = Description of Artificial Sequence: Synthetic peptide
GGSPAPEAAAK

SEQ ID NO: 1789 - protein, 11 aa, synthetic construct
  source 1..11: note = Description of Artificial Sequence: Synthetic peptide
EAAAKGGSPAP

SEQ ID NO: 1790 - protein, 11 aa, synthetic construct
  source 1..11: note = Description of Artificial Sequence: Synthetic peptide
EAAAKPAPGGS

SEQ ID NO: 1791 - protein, 11 aa, synthetic construct
  source 1..11: note = Description of Artificial Sequence: Synthetic peptide
PAPGGSEAAAK

SEQ ID NO: 1792 - protein, 11 aa, synthetic construct
  source 1..11: note = Description of Artificial Sequence: Synthetic peptide
PAPEAAAKGGS

SEQ ID NO: 1793 - protein, 11 aa, synthetic construct
  source 1..11: note = Description of Artificial Sequence: Synthetic peptide
GGGGSSEAAAK

SEQ ID NO: 1794 - protein, 11 aa, synthetic construct
  source 1..11: note = Description of Artificial Sequence: Synthetic peptide
GGGEAAAKGSS

SEQ ID NO: 1795 - protein, 11 aa, synthetic construct
  source 1..11: note = Description of Artificial Sequence: Synthetic peptide
GSSGGGEAAAK

SEQ ID NO: 1796 - protein, 11 aa, synthetic construct
  source 1..11: note = Description of Artificial Sequence: Synthetic peptide
GSSEAAAKGGG

SEQ ID NO: 1797 - protein, 11 aa, synthetic construct
  source 1..11: note = Description of Artificial Sequence: Synthetic peptide
EAAAKGGGGSS

SEQ ID NO: 1798 - protein, 11 aa, synthetic construct
  source 1..11: note = Description of Artificial Sequence: Synthetic peptide
EAAAKGSSGGG

SEQ ID NO: 1799 - protein, 9 aa, synthetic construct
  source 1..9: note = Description of Artificial Sequence: Synthetic peptide
GGGGSSPAP

SEQ ID NO: 1800 - protein, 9 aa, synthetic construct
  source 1..9: note = Description of Artificial Sequence: Synthetic peptide
GGGPAPGSS

SEQ ID NO: 1801 - protein, 9 aa, synthetic construct
  source 1..9: note = Description of Artificial Sequence: Synthetic peptide
GSSGGGPAP

SEQ ID NO: 1802 - protein, 9 aa, synthetic construct
  source 1..9: note = Description of Artificial Sequence: Synthetic peptide
GSSPAPGGG

SEQ ID NO: 1803 - protein, 9 aa, synthetic construct
  source 1..9: note = Description of Artificial Sequence: Synthetic peptide
PAPGGGGSS

SEQ ID NO: 1804 - protein, 9 aa, synthetic construct
  source 1..9: note = Description of Artificial Sequence: Synthetic peptide
PAPGSSGGG

SEQ ID NO: 1805 - protein, 11 aa, synthetic construct
  source 1..11: note = Description of Artificial Sequence: Synthetic peptide
GGGEAAAKPAP

SEQ ID NO: 1806 - protein, 11 aa, synthetic construct
  source 1..11: note = Description of Artificial Sequence: Synthetic peptide
GGGPAPEAAAK

SEQ ID NO: 1807 - protein, 11 aa, synthetic construct
  source 1..11: note = Description of Artificial Sequence: Synthetic peptide
EAAAKGGGPAP

SEQ ID NO: 1808 - protein, 11 aa, synthetic construct
  source 1..11: note = Description of Artificial Sequence: Synthetic peptide
EAAAKPAPGGG

SEQ ID NO: 1809 - protein, 11 aa, synthetic construct
  source 1..11: note = Description of Artificial Sequence: Synthetic peptide
PAPGGGEAAAK

SEQ ID NO: 1810 - protein, 11 aa, synthetic construct
  source 1..11: note = Description of Artificial Sequence: Synthetic peptide
PAPEAAAKGGG

SEQ ID NO: 1811 - protein, 11 aa, synthetic construct
  source 1..11: note = Description of Artificial Sequence: Synthetic peptide
GSSEAAAKPAP

SEQ ID NO: 1812 - protein, 11 aa, synthetic construct
  source 1..11: note = Description of Artificial Sequence: Synthetic peptide
GSSPAPEAAAK

SEQ ID NO: 1813 - protein, 11 aa, synthetic construct
  source 1..11: note = Description of Artificial Sequence: Synthetic peptide
EAAAKGSSPAP

SEQ ID NO: 1814 - protein, 11 aa, synthetic construct
  source 1..11: note = Description of Artificial Sequence: Synthetic peptide
EAAAKPAPGSS

SEQ ID NO: 1815 - protein, 11 aa, synthetic construct
  source 1..11: note = Description of Artificial Sequence: Synthetic peptide
PAPGSSEAAAK

SEQ ID NO: 1816 - protein, 11 aa, synthetic construct
  source 1..11: note = Description of Artificial Sequence: Synthetic peptide
PAPEAAAKGSS

SEQ ID NO: 1817 - protein, 46 aa, synthetic construct; identical to SEQ ID NO: 477
  source 1..46: note = Description of Artificial Sequence: Synthetic polypeptide

SEQ ID NO: 1818 - protein, 15 aa, synthetic construct
  source 1..15: note = Description of Artificial Sequence: Synthetic peptide
GGGGSEAAAKGGGGS

SEQ ID NO: 1819 - protein, 15 aa, synthetic construct
  source 1..15: note = Description of Artificial Sequence: Synthetic peptide
EAAAKGGGGSEAAAK

SEQ ID NO: 1820 - protein, 16 aa, synthetic construct
  source 1..16: note = Description of Artificial Sequence: Synthetic peptide
SGSETPGTSESATPES

SEQ ID NO: 1821 - protein, 12 aa, synthetic construct
  source 1..12: note = Description of Artificial Sequence: Synthetic peptide
GSAGSAAGSGEF

SEQ ID NO: 1822 - protein, 33 aa, synthetic construct; identical to SEQ ID NO: 480
  source 1..33: note = Description of Artificial Sequence: Synthetic polypeptide

SEQ ID NO: 1823 - protein, 30 aa, Rattus norvegicus
AHFKISGEKRPSTDPGKKAKNPKKKKKKDP

SEQ ID NO: 1824 - protein, 12 aa, Saccharomyces cerevisiae
AHRAKKMSKTHA

SEQ ID NO: 1825 - protein, 14 aa, unidentified
  source 1..14: note = Description of Unknown: NLS sequence
ASPEYVNLPINGNG

SEQ ID NO: 1826 - protein, 7 aa, unidentified
  source 1..7: note = Description of Unknown: NLS sequence
CTKRPRW

SEQ ID NO: 1827 - protein, 16 aa, unidentified
  source 1..16: note = Description of Unknown: NLS sequence
DKAKRVSRNKSEKKRR

SEQ ID NO: 1828 - protein, 15 aa, unidentified
  source 1..15: note = Description of Unknown: NLS sequence
EELRLKEELLKGIYA

SEQ ID NO: 1829 - protein, 16 aa, Caenorhabditis elegans
EEQLRRRKNSRLNNTG

SEQ ID NO: 1830 - protein, 24 aa, unidentified
  source 1..24: note = Description of Unknown: NLS sequence
EVLKVIRTGKRKKKAWKRMVTKVC

SEQ ID NO: 1831 - protein, 15 aa, unidentified
  source 1..15: note = Description of Unknown: NLS sequence
HHHHHHHHHHHHQPH

SEQ ID NO: 1832 - protein, 17 aa, unidentified
  source 1..17: note = Description of Unknown: NLS sequence
HKKKHPDASVNFSEFSK

SEQ ID NO: 1833 - protein, 6 aa, Oryza sativa
HKRTKK

SEQ ID NO: 1834 - protein, 29 aa, unidentified
  source 1..29: note = Description of Unknown: NLS sequence
IINGRKLKLKKSRRRSSQTSNNSFTSRRS

SEQ ID NO: 1835 - protein, 8 aa, Oryza sativa
KAEQERRK

SEQ ID NO: 1836 - protein, 18 aa, unidentified
  source 1..18: note = Description of Unknown: NLS sequence
KEKRKRREELFIEQKKRK

SEQ ID NO: 1837 - protein, 14 aa, Mus musculus
KKGKDEWFSRGKKP

SEQ ID NO: 1838 - protein, 12 aa, Homo sapiens
KKGPSVQKRKKT

SEQ ID NO: 1839 - protein, 16 aa, unidentified
  source 1..16: note = Description of Unknown: NLS sequence
KKKTVINDLLHYKKEK

SEQ ID NO: 1840 - protein, 17 aa, unidentified
  source 1..17: note = Description of Unknown: NLS sequence
KKNGGKGKNKPSAKIKK

SEQ ID NO: 1841 - protein, 13 aa, unidentified
  source 1..13: note = Description of Unknown: NLS sequence
KKPKWDDFKKKKK

SEQ ID NO: 1842 - protein, 6 aa, unidentified
  source 1..6: note = Description of Unknown: NLS sequence
KKRKKD

SEQ ID NO: 1843 - protein, 9 aa, unidentified
  source 1..9: note = Description of Unknown: NLS sequence
KKRRKRRRK

SEQ ID NO: 1844 - protein, 9 aa, unidentified
  source 1..9: note = Description of Unknown: NLS sequence
KKRRRRARK

SEQ ID NO: 1845 - protein, 7 aa, Homo sapiens
KKSKRGR

SEQ ID NO: 1846 - protein, 8 aa, Zea mays
KKSRKRGS

SEQ ID NO: 1847 - protein, 17 aa, unidentified
  source 1..17: note = Description of Unknown: NLS sequence
KKSTALSRELGKIMRRR

SEQ ID NO: 1848 - protein, 17 aa, Dictyostelium discoideum
KKSYQDPEIIAHSRPRK

SEQ ID NO: 1849 - protein, 17 aa, unidentified
  source 1..17: note = Description of Unknown: NLS sequence
KKTGKNRKLKSKRVKTR

SEQ ID NO: 1850 - protein, 17 aa, Oryza sativa
KKVSIAGQSGKLWRWKR

SEQ ID NO: 1851 - protein, 20 aa, unidentified
  source 1..20: note = Description of Unknown: NLS sequence
KKYENVVIKRSPRKRGRPRK

SEQ ID NO: 1852 - protein, 6 aa, unidentified
  source 1..6: note = Description of Unknown: NLS sequence
KNKKRK

SEQ ID NO: 1853 - protein, 6 aa, unidentified
  source 1..6: note = Description of Unknown: NLS sequence
KPKKKR

SEQ ID NO: 1854 - protein, 19 aa, Danio rerio
KRAMKDDSHGNSTSPKRRK

SEQ ID NO: 1855 - protein, 17 aa, Homo sapiens
KRANSNLVAAYEKAKKK

SEQ ID NO: 1856 - protein, 22 aa, unidentified
  source 1..22: note = Description of Unknown: NLS sequence
KRASEDTTSGSPPKKSSAGPKR

SEQ ID NO: 1857 - protein, 16 aa, unidentified
  source 1..16: note = Description of Unknown: NLS sequence
KRFKRRWMVRKMKTKK

SEQ ID NO: 1858 - protein, 16 aa, Homo sapiens
KRGLNSSFETSPKKVK

SEQ ID NO: 1859 - protein, 20 aa, unidentified
  source 1..20: note = Description of Unknown: NLS sequence
KRGNSSIGPNDLSKRKQRKK

SEQ ID NO: 1860 - protein, 23 aa, unidentified
  source 1..23: note = Description of Unknown: NLS sequence
KRIHSVSLSQSQIDPSKKVKRAK

SEQ ID NO: 1861 - protein, 15 aa, Homo sapiens
KRKGKLKNKGSKRKK

SEQ ID NO: 1862 - protein, 13 aa, Homo sapiens
KRRRRRRREKRKR

SEQ ID NO: 1863 - protein, 18 aa, Mus musculus
KRSNDRTYSPEEEKQRRA

SEQ ID NO: 1864 - protein, 21 aa, unidentified
  source 1..21: note = Description of Unknown: NLS sequence
KRTVATNGDASGAHRAKKMSK

SEQ ID NO: 1865 - protein, 20 aa, unidentified
  source 1..20: note = Description of Unknown: NLS sequence
KRVYNKGEDEQEHLPKGKKR

SEQ ID NO: 1866 - protein, 18 aa, unidentified
  source 1..18: note = Description of Unknown: NLS sequence
KSGKAPRRRAVSMDNSNK

SEQ ID NO: 1867 - protein, 19 aa, Homo sapiens
KVNFLDMSLDDIIIYKELE

SEQ ID NO: 1868 - protein, 15 aa, Tomato yellow leaf curl China virus
KVQHRIAKKTTRRRR

SEQ ID NO: 1869 - protein, 8 aa, unidentified
  source 1..8: note = Description of Unknown: NLS sequence
LSPSLSPL

SEQ ID NO: 1870 - protein, 30 aa, Homo sapiens; identical to SEQ ID NO: 1585

SEQ ID NO: 1871 - protein, 52 aa, unidentified
  source 1..52: note = Description of Unknown: NLS sequence
MPQNEYIELHRKRYGYRLDYHEKKRKKESREAHERSKKAKKMIGLKAKLYHK

SEQ ID NO: 1872 - protein, 10 aa, unidentified
  source 1..10: note = Description of Unknown: NLS sequence
MVQLRPRASR

SEQ ID NO: 1873 - protein, 24 aa, Caenorhabditis elegans
NNKLLAKRRKGGASPKDDPMDDIK

SEQ ID NO: 1874 - protein, 20 aa, unidentified
  source 1..20: note = Description of Unknown: NLS sequence
NYKRPMDGTYGPPAKRHEGE

SEQ ID NO: 1875 - protein, 19 aa, unidentified
  source 1..19: note = Description of Unknown: NLS sequence
PDTKRAKLDSSETTMVKKK

SEQ ID NO: 1876 - protein, 7 aa, unidentified
  source 1..7: note = Description of Unknown: NLS sequence
PEKRTKI

SEQ ID NO: 1877 - protein, 8 aa, unidentified
  source 1..8: note = Description of Unknown: NLS sequence
PGGRGKKK

SEQ ID NO: 1878 - protein, 18 aa, unidentified
  source 1..18: note = Description of Unknown: NLS sequence
PGKMDKGEHRQERRDRPY

SEQ ID NO: 1879 - protein, 11 aa, Physarum polycephalum
PKKGDKYDKTD

SEQ ID NO: 1880 - protein, 7 aa, unidentified
  source 1..7: note = Description of Unknown: NLS sequence
PKKKSRK

SEQ ID NO: 1881 - protein, 7 aa, Caenorhabditis elegans
PKKNKPE

SEQ ID NO: 1882 - protein, 7 aa, unidentified
  source 1..7: note = Description of Unknown: NLS sequence
PKKRAKV

SEQ ID NO: 1883 - protein, 9 aa, unidentified
  source 1..9: note = Description of Unknown: NLS sequence
PKPKKLKVE

SEQ ID NO: 1884 - protein, 7 aa, unidentified
  source 1..7: note = Description of Unknown: NLS sequence
PKRGRGR

SEQ ID NO: 1885 - protein, 9 aa, Mammalian 1 orthobornavirus
PKRRLVDDA

SEQ ID NO: 1886 - protein, 7 aa, unidentified
  source 1..7: note = Description of Unknown: NLS sequence
PKRRRTY

SEQ ID NO: 1887 - protein, 6 aa, unidentified
  source 1..6: note = Description of Unknown: NLS sequence
PLFKRR

SEQ ID NO: 1888 - protein, 7 aa, unidentified
  source 1..7: note = Description of Unknown: NLS sequence
PLRKAKR

SEQ ID NO: 1889 - protein, 9 aa, unidentified
  source 1..9: note = Description of Unknown: NLS sequence
PPAKRKCIF

SEQ ID NO: 1890 - protein, 8 aa, Homo sapiens
PPARRRRL

SEQ ID NO: 1891 - protein, 8 aa, unidentified
  source 1..8: note = Description of Unknown: NLS sequence
PPKKKRKV

SEQ ID NO: 1892 - protein, 10 aa, Mus musculus
PPNKRMKVKH

SEQ ID NO: 1893 - protein, 13 aa, Mammalian 1 orthobornavirus
PPRIYPQLPSAPT

SEQ ID NO: 1894 - protein, 13 aa, unidentified
  source 1..13: note = Description of Unknown: NLS sequence
PQRSPFPKSSVKR

SEQ ID NO: 1895 - protein, 8 aa, Mammalian 1 orthobornavirus
PRPRKVPR

SEQ ID NO: 1896 - protein, 9 aa, unidentified
  source 1..9: note = Description of Unknown: NLS sequence
PRRRVQRKR

SEQ ID NO: 1897 - protein, 7 aa, unidentified
  source 1..7: note = Description of Unknown: NLS sequence
PRRVRLK

SEQ ID NO: 1898 - protein, 7 aa, unidentified
  source 1..7: note = Description of Unknown: NLS sequence
PSRKRPR

SEQ ID NO: 1899 - protein, 8 aa, unidentified
  source 1..8: note = Description of Unknown: NLS sequence
PSSKKRKV

SEQ ID NO: 1900 - protein, 7 aa, Drosophila melanogaster
PTKKRVK

SEQ ID NO: 1901 - protein, 9 aa, unidentified
  source 1..9: note = Description of Unknown: NLS sequence
QRPGPYDRP

SEQ ID NO: 1902 - protein, 18 aa, unidentified
  source 1..18: note = Description of Unknown: NLS sequence
RGKGGKGLGKGGAKRHRK

SEQ ID NO: 1903 - protein, 24 aa, Zea mays
RKAGKGGGGHKTTKKRSAKDEKVP

SEQ ID NO: 1904 - protein, 9 aa, Xenopus laevis
RKIKLKRAK

SEQ ID NO: 1905 - protein, 9 aa, Xenopus laevis
RKIKRKRAK

SEQ ID NO: 1906 - protein, 17 aa, unidentified
  source 1..17: note = Description of Unknown: NLS sequence
RKKEAPGPREELRSRGR

SEQ ID NO: 1907 - protein, 7 aa, unidentified
  source 1..7: note = Description of Unknown: NLS sequence
RKKRKGK

SEQ ID NO: 1908 - protein, 9 aa, unidentified
  source 1..9: note = Description of Unknown: NLS sequence
RKKRRQRRR

SEQ ID NO: 1909 - protein, 25 aa, Homo sapiens
RKKSIPLSIKNLKRKHKRKKNKITR

SEQ ID NO: 1910 - protein, 20 aa, Homo sapiens
RKLVKPKNTKMKTKLRTNPY

SEQ ID NO: 1911 - protein, 16 aa, unidentified
  source 1..16: note = Description of Unknown: NLS sequence
RKRLILSDKGQLDWKK

SEQ ID NO: 1912 - protein, 7 aa, Homo sapiens
RKRLKSK

SEQ ID NO: 1913 - protein, 9 aa, unidentified
  source 1..9: note = Description of Unknown: NLS sequence
RKRRVRDNM

SEQ ID NO: 1914 - protein, 22 aa, Homo sapiens
RKRSPKDKKEKDLDGAGKRRKT

SEQ ID NO: 1915 - protein, 22 aa, Homo sapiens
RKRTPRVDGQTGENDMNKRRRK

SEQ ID NO: 1916 - protein, 10 aa, unidentified
  source 1..10: note = Description of Unknown: NLS sequence
RLPVRRRRRR

SEQ ID NO: 1917 - protein, 10 aa, Feline immunodeficiency virus
RLRFRKPKSK

SEQ ID NO: 1918 - protein, 6 aa, Homo sapiens
RQQRKR

SEQ ID NO: 1919 - protein, 16 aa, Mus musculus
RRDLNSSFETSPKKVK

SEQ ID NO: 1920 - protein, 8 aa, Arabidopsis thaliana
RRDRAKLR

SEQ ID NO: 1921 - protein, 8 aa, unidentified
  source 1..8: note = Description of Unknown: NLS sequence
RRGDGRRR

SEQ ID NO: 1922 - protein, 11 aa, unidentified
  source 1..11: note = Description of Unknown: NLS sequence
RRGRKRKAEKQ

SEQ ID NO: 1923 - protein, 6 aa, unidentified
  source 1..6: note = Description of Unknown: NLS sequence
RRKKRR

SEQ ID NO: 1924 - protein, 19 aa, Mus musculus
RRKRSKSEDMDSVESKRRR

SEQ ID NO: 1925 - protein, 6 aa, unidentified
  source 1..6: note = Description of Unknown: NLS sequence
RRKRSR

SEQ ID NO: 1926 - protein, 14 aa, Homo sapiens
RRPKGKTLQKRKPK

SEQ ID NO: 1927 - protein, 18 aa, unidentified
  source 1..18: note = Description of Unknown: NLS sequence
RRRGFERFGPDNMGRKRK

SEQ ID NO: 1928 - protein, 15 aa, unidentified
  source 1..15: note = Description of Unknown: NLS sequence
RRRGKNKVAAQNCRK

SEQ ID NO: 1929 - protein, 6 aa, unidentified
  source 1..6: note = Description of Unknown: NLS sequence
RRRKRR

SEQ ID NO: 1930 - protein, 14 aa, unidentified
  source 1..14: note = Description of Unknown: NLS sequence
RRRQKQKGGASRRR

SEQ ID NO: 1931 - protein, 13 aa, unidentified
  source 1..13: note = Description of Unknown: NLS sequence
RRRREGPRARRRR

SEQ ID NO: 1932 - protein, 61 aa, unidentified
  source 1..61: note = Description of Unknown: NLS sequence
RRTIRLKLVYDKCDRSCKIQKKNRNKCQYCRFHKCLSVGMSHNAIRFGRMPRSEKAKLKAE

SEQ ID NO: 1933 - protein, 17 aa, unidentified
  source 1..17: note = Description of Unknown: NLS sequence
RRVPQRKEVSRCRKCRK

SEQ ID NO: 1934 - protein, 32 aa, Human mastadenovirus C
RVGGRRQAVECIEDLLNEPGQPLDLSCKRPRP

SEQ ID NO: 1935 - protein, 9 aa, unidentified
  source 1..9: note = Description of Unknown: NLS sequence
RVVKLRIAP

SEQ ID NO: 1936 - protein, 6 aa, Mus musculus
RVVRRR

SEQ ID NO: 1937 - protein, 12 aa, unidentified
  source 1..12: note = Description of Unknown: NLS sequence
SKRKTKISRKTR

SEQ ID NO: 1938 - protein, 16 aa, Squash leaf curl virus
SYVKTVPNRTRTYIKL

SEQ ID NO: 1939 - protein, 12 aa, unidentified
  source 1..12: note = Description of Unknown: NLS sequence
TGKNEAKKRKIA

SEQ ID NO: 1940 - protein, 30 aa, unidentified
  source 1..30: note = Description of Unknown: NLS sequence
TLSPASSPSSVSCPVIPASTDESPGSALNI

SEQ ID NO: 1941 - protein, 12 aa, unidentified
  source 1..12: note = Description of Unknown: NLS sequence
VSKKQRTGKKIH

SEQ ID NO: 1942 - protein, 9 aa, unidentified
  source 1..9: note = Description of Unknown: NLS sequence
SPKKKRKVE

SEQ ID NO: 1943 - protein, 19 aa, unidentified
  source 1..19: note = Description of Unknown: NLS sequence
KRTADGSEFESPKKKRKVE

SEQ ID NO: 1944 - protein, 9 aa, unidentified
  source 1..9: note = Description of Unknown: NLS sequence
PAAKRVKLD

SEQ ID NO: 1945 - protein, 7 aa, unidentified
  source 1..7: note = Description of Unknown: NLS sequence
PKKKRKV

SEQ ID NO: 1946 - protein, 30 aa, unidentified; identical to SEQ ID NO: 1585
  source 1..30: note = Description of Unknown: NLS sequence

SEQ ID NO: 1947 - protein, 11 aa, unidentified
  source 1..11: note = Description of Unknown: NLS sequence
SPKKKRKVEAS

SEQ ID NO: 1948 - protein, 16 aa, unidentified
  source 1..16: note = Description of Unknown: NLS sequence
MAPKKKRKVGIHRGVP

SEQ ID NO: 1949 - protein, 1082 aa, synthetic construct
  source 1..1082: note = Description of Artificial Sequence: Synthetic polypeptide
MAAFKPNPINYILGLDIGIASVGWAMVEIDEEENPIRLIDLGVRVFERAEVPKTGDSLAMARRLARSVRRLTRRRAHRLLRARRLLKREGVLQAADFDENGLIKSLPNTPWQLRAAALDRKLTPLEWSAVLLHLIKHRGYLSQRKNEGETADKELGALLKGVANNAHALQTGDFRTPAELALNKFEKESGHIRNQRGDYSHTFSRKDLQAELILLFEKQKEFGNPHVSGGLKEGIETLLMTQRPALSGDAVQKMLGHCTFEPAEPKAAKNTYTAERFIWLTKLNNLRILEQGSERPLTDTERATLMDEPYRKSKLTYAQARKLLGLEDTAFFKGLRYGKDNAEASTLMEMKAYHAISRALEKEGLKDKKSPLNLSSELQDEIGTAFSLFKTDEDITGRLKDRVQPEILEALLKHISFDKFVQISLKALRRIVPLMEQGKRYDEACAEIYGDHYGKKNTEEKIYLPPIPADEIRNPVVLRALSQARKVINGVVRRYGSPARIHIETAREVGKSFKDRKEIEKRQEENRKDREKAAAKFREYFPNFVGEPKSKDILKLRLYEQQHGKCLYSGKEINLVRLNEKGYVEIDHALPFSRTWDDSFNNKVLVLGSENQNKGNQTPYEYFNGKDNSREWQEFKARVETSRFPRSKKQRILLQKFDEDGFKECNLNDTRYVNRFLCQFVADHILLTGKGKRRVFASNGQITNLLRGFWGLRKVRAENDRHHALDAVVVACSTVAMQQKITRFVRYKEMNAFDGKTIDKETGKVLHQKTHFPQPWEFFAQEVMIRVFGKPDGKPEFEEADTPEKLRTLLAEKLSSRPEAVHEYVTPLFVSRAPNRKMSGAHKDTLRSAKRFVKHNEKISVKRVWLTEIKLADLENMVNYKNGREIELYEALKARLEAYGGNAKQAFDPKDNPFYKKGGQLVKAVRVEKTQESGVLLNKKNAYTIADNGDMVRVDVFCKVDKKGKNQYFIVPIYAWQVAENILPDIDCKGYRIDDSYTFCFSLHKYDLIAFQKDEKSKVEFAYYINCDSSNGRFYLAWHDKGSKEQQFRISTQNLVLIQKYQVNELGKEIRPCRLKKRPPVR

SEQ ID NO: 1950 - protein, 1055 aa, synthetic construct
  source 1..1055: note = Description of Artificial Sequence: Synthetic polypeptide
MQNNPLNYILGLDLGIASIGWAVVEIDEESSPIRLIDVGVRTFERAEVAKTGESLALSRRLARSSRRLIKRRAERLKKAKRLLKAEKILHSIDEKLPINVWQLRVKGLKEKLERQEWAAVLLHLSKHRGYLSQRKNEGKSDNKELGALLSGIASNHQMLQSSEYRTPAEIAVKKFQVEEGHIRNQRGSYTHTFSRLDLLAEMELLFQRQAELGNSYTSTTLLENLTALLMWQKPALAGDAILKMLGKCTFEPSEYKAAKNSYSAERFVWLTKLNNLRILENGTERALNDNERFALLEQPYEKSKLTYAQVRAMLALSDNAIFKGVRYLGEDKKTVESKTTLIEMKFYHQIRKTLGSAELKKEWNELKGNSDLLDEIGTAFSLYKTDDDICRYLEGKLPERVLNALLENLNFDKFIQLSLKALHQILPLMLQGQRYDEAVSAIYGDHYGKKSTETTRLLPTIPADEIRNPVVLRTLTQARKVINAVVRLYGSPARIHIETAREVGKSYQDRKKLEKQQEDNRKQRESAVKKFKEMFPHFVGEPKGKDILKMRLYELQQAKCLYSGKSLELHRLLEKGYVEVDHALPFSRTWDDSFNNKVLVLANENQNKGNLTPYEWLDGKNNSERWQHFVVRVQTSGFSYAKKQRILNHKLDEKGFIERNLNDTRYVARFLCNFIADNMLLVGKGKRNVFASNGQITALLRHRWGLQKVREQNDRHHALDAVVVACSTVAMQQKITRFVRYNEGNVFSGERIDRETGEIIPLHFPSPWAFFKENVEIRIFSENPKLELENRLPDYPQYNHEWVQPLFVSRMPTRKMTGQGHMETVKSAKRLNEGLSVLKVPLTQLKLSDLERMVNRDREIALYESLKARLEQFGNDPAKAFAEPFYKKGGALVKAVRLEQTQKSGVLVRDGNGVADNASMVRVDVFTKGGKYFLVPIYTWQVAKGILPNRAATQGKDENDWDIMDEMATFQFSLCQNDLIKLVTKKKTIFGYFNGLNRATSNINIKEHDLDKSKGKLGIYLEVGVKLAISLEKYQVDELGKNIRPCRPTKRQHVR

SEQ ID NO: 1951 - protein, 1053 aa, synthetic construct
  source 1..1053: note = Description of Artificial Sequence: Synthetic polypeptide
MKRNYILGLDIGITSVGYGIIDYETRDVIDAGVRLFKEANVENNEGRRSKRGARRLKRRRRHRIQRVKKLLFDYNLLTDHSELSGINPYEARVKGLSQKLSEEEFSAALLHLAKRRGVHNVNEVEEDTGNELSTKEQISRNSKALEEKYVAELQLERLKKDGEVRGSINRFKTSDYVKEAKQLLKVQKAYHQLDQSFIDTYIDLLETRRTYYEGPGEGSPFGWKDIKEWYEMLMGHCTYFPEELRSVKYAYNADLYNALNDLNNLVITRDENEKLEYYEKFQIIENVFKQKKKPTLKQIAKEILVNEEDIKGYRVTSTGKPEFTNLKVYHDIKDITARKEIIENAELLDQIAKILTIYQSSEDIQEELTNLNSELTQEEIEQISNLKGYTGTHNLSLKAINLILDELWHTNDNQIAIFNRLKLVPKKVDLSQQKEIPTTLVDDFILSPVVKRSFIQSIKVINAIIKKYGLPNDIIIELAREKNSKDAQKMINEMQKRNRQTNERIEEIIRTTGKENAKYLIEKIKLHDMQEGKCLYSLEAIPLEDLLNNPFNYEVDHIIPRSVSFDNSFNNKVLVKQEENSKKGNRTPFQYLSSSDSKISYETFKKHILNLAKGKGRISKTKKEYLLEERDINRFSVQKDFINRNLVDTRYATRGLMNLLRSYFRVNNLDVKVKSINGGFTSFLRRKWKFKKERNKGYKHHAEDALIIANADFIFKEWKKLDKAKKVMENQMFEEKQAESMPEIETEQEYKEIFITPHQIKHIKDFKDYKYSHRVDKKPNRELINDTLYSTRKDDKGNTLIVNNLNGLYDKDNDKLKKLINKSPEKLLMYHHDPQTYQKLKLIMEQYGDEKNPLYKYYEETGNYLTKYSKKDNGPVIKKIKYYGNKLNAHLDITDDYPNSRNKVVKLSLKPYRFDVYLDNGVYKFVTVKNLDVIKKENYYEVNSKCYEEAKKLKKISNQAEFIASFYNNDLIKINGELYRVIGVNNDLLNRIEVNMIDITYREYLENMNDKRPPRIIKTIASKTQSIKKYSTDILGNLYEVKSKKHPQIIKKG

SEQ ID NO: 1952 - protein, 1053 aa, synthetic construct
  source 1..1053: note = Description of Artificial Sequence: Synthetic polypeptide
MKRNYILGLDIGITSVGYGIIDYETRDVIDAGVRLFKEANVENNEGRRSKRGARRLKRRRRHRIQRVKKLLFDYNLLTDHSELSGINPYEARVKGLSQKLSEEEFSAALLHLAKRRGVHNVNEVEEDTGNELSTKEQISRNSKALEEKYVAELQLERLKKDGEVRGSINRFKTSDYVKEAKQLLKVQKAYHQLDQSFIDTYIDLLETRRTYYEGPGEGSPFGWKDIKEWYEMLMGHCTYFPEELRSVKYAYNADLYNALNDLNNLVITRDENEKLEYYEKFQIIENVFKQKKKPTLKQIAKEILVNEEDIKGYRVTSTGKPEFTNLKVYHDIKDITARKEIIENAELLDQIAKILTIYQSSEDIQEELTNLNSELTQEEIEQISNLKGYTGTHNLSLKAINLILDELWHTNDNQIAIFNRLKLVPKKVDLSQQKEIPTTLVDDFILSPVVKRSFIQSIKVINAIIKKYGLPNDIIIELAREKNSKDAQKMINEMQKRNRQTNERIEEIIRTTGKENAKYLIEKIKLHDMQEGKCLYSLEAIPLEDLLNNPFNYEVDHIIPRSVSFDNSFNNKVLVKQEENSKKGNRTPFQYLSSSDSKISYETFKKHILNLAKGKGRISKTKKEYLLEERDINRFSVQKDFINRNLVDTRYATRGLMNLLRSYFRVNNLDVKVKSINGGFTSFLRRKWKFKKERNKGYKHHAEDALIIANADFIFKEWKKLDKAKKVMENQMFEEKQAESMPEIETEQEYKEIFITPHQIKHIKDFKDYKYSHRVDKKPNRKLINDTLYSTRKDDKGNTLIVNNLNGLYDKDNDKLKKLINKSPEKLLMYHHDPQTYQKLKLIMEQYGDEKNPLYKYYEETGNYLTKYSKKDNGPVIKKIKYYGNKLNAHLDITDDYPNSRNKVVKLSLKPYRFDVYLDNGVYKFVTVKNLDVIKKENYYEVNSKCYEEAKKLKKISNQAEFIASFYKNDLIKINGELYRVIGVNNDLLNRIEVNMIDITYREYLENMNDKRPPHIIKTIASKTQSIKKYSTDILGNLYEVKSKKHPQIIKKG

SEQ ID NO: 1953 - protein, 1061 aa, synthetic construct
  source 1..1061: note = Description of Artificial Sequence: Synthetic polypeptide
MQENQQKQNYILGLDIGITSVGYGLIDSKTREVIDAGVRLFPEADSENNSNRRSKRGARRLKRRRIHRLNRVKDLLADYQMIDLNNVPKSTDPYTIRVKGLREPLTKEEFAIALLHIAKRRGLHNISVSMGDEEQDNELSTKQQLQKNAQQLQDKYVCELQLERLTNINKVRGEKNRFKTEDFVKEVKQLCETQRQYHNIDDQFIQQYIDLVSTRREYFEGPGNGSPYGWDGDLLKWYEKLMGRCTYFPEELRSVKYAYSADLFNALNDLNNLVVTRDDNPKLEYYEKYHIIENVFKQKKNPTLKQIAKEIGVQDYDIRGYRITKSGKPQFTSFKLYHDLKNIFEQAKYLEDVEMLDEIAKILTIYQDEISIKKALDQLPELLTESEKSQIAQLTGYTGTHRLSLKCIHIVIDELWESPENQMEIFTRLNLKPKKVEMSEIDSIPTTLVDEFILSPVVKRAFIQSIKVINAVINRFGLPEDIIIELAREKNSKDRRKFINKLQKQNEATRKKIEQLLAKYGNTNAKYMIEKIKLHDMQEGKCLYSLEAIPLEDLLSNPTHYEVDHIIPRSVSFDNSLNNKVLVKQSENSKKGNRTPYQYLSSNESKISYNQFKQHILNLSKAKDRISKKKRDMLLEERDINKFEVQKEFINRNLVDTRYATRELSNLLKTYFSTHDYAVKVKTINGGFTNHLRKVWDFKKHRNHGYKHHAEDALVIANADFLFKTHKALRRTDKILEQPGLEVNDTTVKVDTEEKYQELFETPKQVKNIKQFRDFKYSHRVDKKPNRQLINDTLYSTREIDGETYVVQTLKDLYAKDNEKVKKLFTERPQKILMYQHDPKTFEKLMTILNQYAEAKNPLAAYYEDKGEYVTKYAKKGNGPAIHKIKYIDKKLGSYLDVSNKYPETQNKLVKLSLKSFRFDIYKCEQGYKMVSIGYLDVLKKDNYYYIPKDKYEAEKQKKKIKESDLFVGSFYYNDLIMYEDELFRVIGVNSDINNLVELNMVDITYKDFCEVNNVTGEKRIKKTIGKRVVLIEKYTTDILGNLYKTPLPKKPQLIFKRGEL

SEQ ID NO: 1954 - protein, 1061 aa, synthetic construct
  source 1..1061: note = Description of Artificial Sequence: Synthetic polypeptide
MQENQQKQNYILGLDIGITSVGYGLIDSKTREVIDAGVRLFPEADSENNSNRRSKRGARRLKRRRIHRLNRVKDLLADYQMIDLNNVPKSTDPYTIRVKGLREPLTKEEFAIALLHIAKRRGLHNISVSMGDEEQDNELSTKQQLQKNAQQLQDKYVCELQLERLTNINKVRGEKNRFKTEDFVKEVKQLCETQRQYHNIDDQFIQQYIDLVSTRREYFEGPGNGSPYGWDGDLLKWYEKLMGRCTYFPEELRSVKYAYSADLFNALNDLNNLVVTRDDNPKLEYYEKYHIIENVFKQKKNPTLKQIAKEIGVQDYDIRGYRITKSGKPQFTSFKLYHDLKNIFEQAKYLEDVEMLDEIAKILTIYQDEISIKKALDQLPELLTESEKSQIAQLTGYTGTHRLSLKCIHIVIDELWESPENQMEIFTRLNLKPKKVEMSEIDSIPTTLVDEFILSPVVKRAFIQSIKVINAVINRFGLPEDIIIELAREKNSKDRRKFINKLQKQNEATRKKIEQLLAKYGNTNAKYMIEKIKLHDMQEGKCLYSLEAIPLEDLLSNPTHYEVDHIIPRSVSFDNSLNNKVLVKQSENSKKGNRTPYQYLSSNESKISYNQFKQHILNLSKAKDRISKKKRDMLLEERDINKFEVQKEFINRNLVDTRYATRELSNLLKTYFSTHDYAVKVKTINGGFTNHLRKVWDFKKHRNHGYKHHAEDALVIANADFLFKTHKALRRTDKILEQPGLEVNDTTVKVDTEEKYQELFETPKQVKNIKQFRDFKYSHRVDKKPNRKLINDTLYSTREIDGETYVVQTLKDLYAKDNEKVKKLFTERPQKILMYQHDPKTFEKLMTILNQYAEAKNPLAAYYEDKGEYVTKYAKKGNGPAIHKIKYIDKKLGSYLDVSNKYPETQNKLVKLSLKSFRFDIYKCEQGYKMVSIGYLDVLKKDNYYYIPKDKYEAEKQKKKIKESDLFVGSFYKNDLIMYEDELFRVIGVNSDINNLVELNMVDITYKDFCEVNNVTGEKHIKKTIGKRVVLIEKYTTDILGNLYKTPLPKKPQLIFKRGEL

SEQ ID NO: 1955 - protein, 1375 aa, synthetic construct
  source 1..1375: note = Description of Artificial Sequence: Synthetic polypeptide
MEKKYSIGLDIGTNSVGWAVITDDYKVPSKKFKVLGNTNRKSIKKNLMGALLFDSGETAEATRLKRTARRRYTRRKNRIRYLQEIFANEMAKLDDSFFQRLEESFLVEEDKKNERHPIFGNLADEVAYHRNYPTIYHLRKKLADSPEKADLRLIYLALAHIIKFRGHFLIEGKLNAENSDVAKLFYQLIQTYNQLFEESPLDEIEVDAKGILSARLSKSKRLEKLIAVFPNEKKNGLFGNIIALALGLTPNFKSNFDLTEDAKLQLSKDTYDDDLDELLGQIGDQYADLFSAAKNLSDAILLSDILRSNSEVTKAPLSASMVKRYDEHHQDLALLKTLVRQQFPEKYAEIFKDDTKNGYAGYVGADKKLRKRSGKLATEEEFYKFIKPILEKMDGAEELLAKLNRDDLLRKQRTFDNGSIPHQIHLKELHAILRRQEEFYPFLKENREKIEKILTFRIPYYVGPLARGNSRFAWLTRKSEEAITPWNFEEVVDKGASAQSFIERMTNFDEQLPNKKVLPKHSLLYEYFTVYNELTKVKYVTERMRKPEFLSGEQKKAIVDLLFKTNRKVTVKQLKEDYFKKIECFDSVEIIGVEDRFNASLGTYHDLLKIIKDKDFLDNEENEDILEDIVLTLTLFEDREMIEERLKTYAHLFDDKVMKQLKRRHYTGWGRLSRKMINGIRDKQSGKTILDFLKSDGFSNRNFMQLIHDDSLTFKEEIEKAQVSGQGDSLHEQIADLAGSPAIKKGILQTVKIVDELVKVMGHKPENIVIEMARENQTTTKGLQQSRERKKRIEEGIKELESQILKENPVENTQLQNEKLYLYYLQNGRDMYVDQELDINRLSDYDVDHIVPQSFIKDDSIDNKVLTRSVENRGKSDNVPSEEVVKKMKNYWRQLLNAKLITQRKFDNLTKAERGGLSEADKAGFIKRQLVETRQITKHVARILDSRMNTKRDKNDKPIREVKVITLKSKLVSDFRKDFQLYKVRDINNYHHAHDAYLNAVVGTALIKKYPKLESEFVYGDYKVYDVRKMIAKSEQEIGKATAKRFFYSNIMNFFKTEVKLANGEIRKRPLIETNGETGEVVWNKEKDFATVRKVLAMPQVNIVKKTEVQTGGFSKESILSKRESAKLIPRKKGWDTRKYGGFGSPTVAYSILVVAKVEKGKAKKLKSVKVLVGITIMEKGSYEKDPIGFLEAKGYKDIKKELIFKLPKYSLFELENGRRRMLASAKELQKANELVLPQHLVRLLYYTQNISATTGSNNLGYIEQHREEFKEIFEKIIDFSEKYILKNKVNSNLKSSFDEQFAVSDSILLSNSFVSLLKYTSFGASGGFTFLDLDVKQGRLRYQTVTEVLDATLIYQSITGLYETRTDLSQLGGD

SEQ ID NO: 1956 - protein, 1368 aa, synthetic construct [sequence omitted]

SEQ ID NO: 1957 - protein, 1368 aa, synthetic construct
  source 1..1368: note = Description of Artificial Sequence: Synthetic polypeptide
MDKKYSIGLDIGTNSVGWAVITDEYKVPSKKFKVLGNTDRHSIKKNLIGALLFDSGETAEATRLKRTARRRYTRRKNRICYLQEIFSNEMAKVDDSFFHRLEESFLVEEDKKHERHPIFGNIVDEVAYHEKYPTIYHLRKKLVDSTDKADLRLIYLALAHMIKFRGHFLIEGDLNPDNSDVDKLFIQLVQTYNQLFEENPINASGVDAKAILSARLSKSRRLENLIAQLPGEKKNGLFGNLIALSLGLTPNFKSNFDLAEDAKLQLSKDTYDDDLDNLLAQIGDQYADLFLAAKNLSDAILLSDILRVNTEITKAPLSASMIKRYDEHHQDLTLLKALVRQQLPEKYKEIFFDQSKNGYAGYIDGGASQEEFYKFIKPILEKMDGTEELLVKLNREDLLRKQRTFDNGSIPHQIHLGELHAILRRQEDFYPFLKDNREKIEKILTFRIPYYVGPLARGNSRFAWMTRKSEETITPWNFEEVVDKGASAQSFIERMTNFDKNLPNEKVLPKHSLLYEYFTVYNELTKVKYVTEGMRKPAFLSGEQKKAIVDLLFKTNRKVTVKQLKEDYFKKIECFDSVEISGVEDRFNASLGTYHDLLKIIKDKDFLDNEENEDILEDIVLTLTLFEDREMIEERLKTYAHLFDDKVMKQLKRRRYTGWGRLSRKLINGIRDKQSGKTILDFLKSDGFANRNFMQLIHDDSLTFKEDIQKAQVSGQGDSLHEHIANLAGSPAIKKGILQTVKVVDELVKVMGRHKPENIVIEMARENQTTQKGQKNSRERMKRIEEGIKELGSQILKEHPVENTQLQNEKLYLYYLQNGRDMYVDQELDINRLSDYDVDHIVPQSFLKDDSIDNKVLTRSDKNRGKSDNVPSEEVVKKMKNYWRQLLNAKLITQRKFDNLTKAERGGLSELDKAGFIKRQLVETRQITKHVAQILDSRMNTKYDENDKLIREVKVITLKSKLVSDFRKDFQFYKVREINNYHHAHDAYLNAVVGTALIKKYPKLESEFVYGDYKVYDVRKMIAKSEQEIGKATAKYFFYSNIMNFFKTEITLANGEIRKRPLIETNGETGEIVWDKGRDFATVRKVLSMPQVNIVKKTEVQTGGFSKESIRPKRNSDKLIARKKDWDPKKYGGFVSPTVAYSVLVVAKVEKGKSKKLKSVKELLGITIMERSSFEKNPIDFLEAKGYKEVKKDLIIKLPKYSLFELENGRKRMLASARFLQKGNELALPSKYVNFLYLASHYEKLKGSPEDNEQKQLFVEQHKHYLDEIIEQISEFSKRVILADANLDKVLSAYNKHRDKPIREQAENIIHLFTLTNLGAPRAFKYFDTTIDRKVYRSTKEVLDATLIHQSITGLYETRIDLSQLGGD

SEQ ID NO: 1958 - protein, 1368 aa, synthetic construct
  source 1..1368: note = Description of Artificial Sequence: Synthetic polypeptide
MDKKYSIGLDIGTNSVGWAVITDEYKVPSKKFKVLGNTDRHSIKKNLIGALLFDSGETAERTRLKRTARRRYTRRKNRICYLQEIFSNEMAKVDDSFFHRLEESFLVEEDKKHERHPIFGNIVDEVAYHEKYPTIYHLRKKLVDSTDKADLRLIYLALAHMIKFRGHFLIEGDLNPDNSDVDKLFIQLVQTYNQLFEENPINASGVDAKAILSARLSKSRRLENLIAQLPGEKKNGLFGNLIALSLGLTPNFKSNFDLAEDAKLQLSKDTYDDDLDNLLAQIGDQYADLFLAAKNLSDAILLSDILRVNTEITKAPLSASMIKRYDEHHQDLTLLKALVRQQLPEKYKEIFFDQSKNGYAGYIDGGASQEEFYKFIKPILEKMDGTEELLVKLNREDLLRKQRTFDNGSIPHQIHLGELHAILRRQEDFYPFLKDNREKIEKILTFRIPYYVGPLARGNSRFAWMTRKSEETITPWNFEEVVDKGASAQSFIERMTNFDKNLPNEKVLPKHSLLYEYFTVYNELTKVKYVTEGMRKPAFLSGEQKKAIVDLLFKTNRKVTVKQLKEDYFKKIECFDSVEISGVEDRFNASLGTYHDLLKIIKDKDFLDNEENEDILEDIVLTLTLFEDREMIEERLKTYAHLFDDKVMKQLKRRRYTGWGRLSRKLINGIRDKQSGKTILDFLKSDGFANRNFMQLIHDDSLTFKEDIQKAQVSGQGDSLHEHIANLAGSPAIKKGILQTVKVVDELVKVMGRHKPENIVIEMARENQTTQKGQKNSRERMKRIEEGIKELGSQILKEHPVENTQLQNEKLYLYYLQNGRDMYVDQELDINRLSDYDVDHIVPQSFLKDDSIDNKVLTRSDKNRGKSDNVPSEEVVKKMKNYWRQLLNAKLITQRKFDNLTKAERGGLSELDKAGFIKRQLVETRQITKHVAQILDSRMNTKYDENDKLIREVKVITLKSKLVSDFRKDFQFYKVREINNYHHAHDAYLNAVVGTALIKKYPKLESEFVYGDYKVYDVRKMIAKSEQEIGKATAKYFFYSNIMNFFKTEITLANGEIRKRPLIETNGETGEIVWDKGRDFATVRKVLSMPQVNIVKKTEVQTGGFSKESIRPKRNSDKLIARKKDWDPKKYGGFLWPTVAYSVLVVAKVEKGKSKKLKSVKELLGITIMERSSFEKNPIDFLEAKGYKEVKKDLIIKLPKYSLFELENGRKRMLASAKQLQKGNELALPSKYVNFLYLASHYEKLKGSPEDNEQKQLFVEQHKHYLDEIIEQISEFSKRVILADANLDKVLSAYNKHRDKPIREQAENIIHLFTLTRLGAPRAFKYFDTTIDPKQYRSTKEVLDATLIHQSITGLYETRIDLSQLGGD

SEQ ID NO: 1959 - protein, 1121 aa, synthetic construct
  source 1..1121: note = Description of Artificial Sequence: Synthetic polypeptide
MSDLVLGLDIGIGSVGVGILNKVTGEIIHKNSRIFPAAQAENNLVRRTNRQGRRLARRKKHRRVRLNRLFEESGLITDFTKISINLNPYQLRVKGLTDELSNEELFIALKNMVKHRGISYLDDASDDGNSSVGDYAQIVKENSKQLETKTPGQIQLERYQTYGQLRGDFTVEKDGKKHRLINVFPTSAYRSEALRILQTQQEFNPQITDEFINRYLEILTGKRKYYHGPGNEKSRTDYGRYRTSGETLDNIFGILIGKCTFYPDEFRAAKASYTAQEFNLLNDLNNLTVPTETKKLSKEQKNQIINYVKNEKAMGPAKLFKYIAKLLSCDVADIKGYRIDKSGKAEIHTFEAYRKMKTLETLDIEQMDRETLDKLAYVLTLNTEREGIQEALEHEFADGSFSQKQVDELVQFRKANSSIFGKGWHNFSVKLMMELIPELYETSEEQMTILTRLGKQKTTSSSNKTKYIDEKLLTEEIYNPVVAKSVRQAIKIVNAAIKEYGDFDNIVIEMARETNEDDEKKAIQKIQKANKDEKDAAMLKAANQYNGKAELPHSVFHGHKQLATKIRLWHQQGERCLYTGKTISIHDLINNSNQFEVDHILPLSITFDDSLANKVLVYATANQEKGQRTPYQALDSMDDAWSFRELKAFVRESKTLSNKKKEYLLTEEDISKFDVRKKFIERNLVDTRYASRVVLNALQEHFRAHKIDTKVSVVRGQFTSQLRRHWGIEKTRDTYHHHAVDALIIAASSQLNLWKKQKNTLVSYSEDQLLDIETGELISDDEYKESVFKAPYQHFVDTLKSKEFEDSILFSYQVDSKFNRKISDATIYATRQAKVGKDKADETYVLGKIKDIYTQDGYDAFMKIYKKDKSKFLMYRHDPQTFEKVIEPILENYPNKQINEKGKEVPCNPFLKYKEEHGYIRKYSKKGNGPEIKSLKYYDSKLGNHIDITPKDSNNKVVLQSVSPWRADVYFNKTTGKYEILGLKYADLQFEKGTGTYKISQEKYNDIKKKEGVDSDSEFKFTLYKNDLLLVKDTETKEQQLFRFLSRTMPKQKHYVELKPYDKQKFEGGEALIKVLGNVANSGQCKKGLGKSNISIYKVRTDVLGNQHIIKNEGDKPKLDF

SEQ ID NO: 1960 - protein, 1092 aa, synthetic construct
  source 1..1092: note = Description of Artificial Sequence: Synthetic polypeptide
MAYTMGIDVGIASCGWAIVDLERQRIIDIGVRTFEKAENPKNGEALAVPRREARSSRRRLRRKKHRIERLKHMFVRNGLAVDIQHLEQTLRSQNEIDVWQLRVDGLDRMLTQKEWLRVLIHLAQRRGFQSNRKTDGSSEDGQVLVNVTENDRLMEEKDYRTVAEMMVKDEKFSDHKRNKNGNYHGVVSRSSLLVEIHTLFETQRQHHNSLASKDFELEYVNIWSAQRPVATKDQIEKMIGTCTFLPKEKRAPKASWHFQYFMLLQTINHIRITNVQGTRSLNKEEIEQVVNMALTKSKVSYHDTRKILDLSEEYQFVGLDYGKEDEKKKVESKETIIKLDDYHKLNKIFNEVELAKGETWEADDYDTVAYALTFFKDDEDIRDYLQNKYKDSKNRLVKNLANKEYTNELIGKVSTLSFRKVGHLSLKALRKIIPFLEQGMTYDKACQAAGFDFQGISKKKRSVVLPVIDQISNPVVNRALTQTRKVINALIKKYGSPETIHIETARELSKTFDERKNITKDYKENRDKNEHAKKHLSELGIINPTGLDIVKYKLWCEQQGRCMYSNQPISFERLKESGYTEVDHIIPYSRSMNDSYNNRVLVMTRENREKGNQTPFEYMGNDTQRWYEFEQRVTTNPQIKKEKRQNLLLKGFTNRRELEMLERNLNDTRYITKYLSHFISTNLEFSPSDKKKKVVNTSGRITSHLRSRWGLEKNRGQNDLHHAMDAIVIAVTSDSFIQQVTNYYKRKERRELNGDDKFPLPWKFFREEVIARLSPNPKEQIEALPNHFYSEDELADLQPIFVSRMPKRSITGEAHQAQFRRVVGKTKEGKNITAKKTALVDISYDKNGDFNMYGRETDPATYEAIKERYLEFGGNVKKAFSTDLHKPKKDGTKGPLIKSVRIMENKTLVHPVNKGKGVVYNSSIVRTDVFQRKEKYYLLPVYVTDVTKGKLPNKVIVAKKGYHDWIEVDDSFTFLFSLYPNDLIFIRQNPKKKISLKKRIESHSISDSKEVQEIHAYYKGVDSSTAAIEFIIHDGSYYAKGVGVQNLDCFEKYQVDILGNYFKVKGEKRLELETSDSNHKGKDVNSIKSTSR

SEQ ID NO: 1961 - protein, 1053 aa, synthetic construct
  source 1..1053: note = Description of Artificial Sequence: Synthetic polypeptide
MKRNYILGLDIGITSVGYGIIDYETRDVIDAGVRLFKEANVENNEGRRSKRGARRLKRRRRHRIQRVKKLLFDYNLLTDHSELSGINPYEARVKGLSQKLSEEEFSAALLHLAKRRGVHNVNEVEEDTGNELSTKEQISRNSKALEEKYVAELQLERLKKDGEVRGSINRFKTSDYVKEAKQLLKVQKAYHQLDQSFIDTYIDLLETRRTYYEGPGEGSPFGWKDIKEWYEMLMGHCTYFPEELRSVKYAYNADLYNALNDLNNLVITRDENEKLEYYEKFQIIENVFKQKKKPTLKQIAKEILVNEEDIKGYRVTSTGKPEFTNLKVYHDIKDITARKEIIENAELLDQIAKILTIYQSSEDIQEELTNLNSELTQEEIEQISNLKGYTGTHNLSLKAINLILDELWHTNDNQIAIFNRLKLVPKKVDLSQQKEIPTTLVDDFILSPVVKRSFIQSIKVINAIIKKYGLPNDIIIELAREKNSKDAQKMINEMQKRNRQTNERIEEIIRTTGKENAKYLIEKIKLHDMQEGKCLYSLEAIPLEDLLNNPFNYEVDHIIPRSVSFDNSFNNKVLVKQEENSKKGNRTPFQYLSSSDSKISYETFKKHILNLAKGKGRISKTKKEYLLEERDINRFSVQKDFINRNLVDTRYATRGLMNLLRSYFRVNNLDVKVKSINGGFTSFLRRKWKFKKERNKGYKHHAEDALIIANADFIFKEWKKLDKAKKVMENQMFEEKQAESMPEIETEQEYKEIFITPHQIKHIKDFKDYKYSHRVDKKPNRKLINDTLYSTRKDDKGNTLIVNNLNGLYDKDNDKLKKLINKSPEKLLMYHHDPQTYQKLKLIMEQYGDEKNPLYKYYEETGNYLTKYSKKDNGPVIKKIKYYGNKLNAHLDITDDYPNSRNKVVKLSLKPYRFDVYLDNGVYKFVTVKNLDVIKKENYYEVNSKCYEEAKKLKKISNQAEFIASFYKNDLIKINGELYRVIGVNSDKNNLIEVNMIDITYREYLENMNDKRPPHIIKTIASKTQSIKKYSTDILGNLYEVKSKKHPQIIKKG

SEQ ID NO: 1962 - protein, 1053 aa, synthetic construct
  source 1..1053: note = Description of Artificial Sequence: Synthetic polypeptide
MKRNYILGLDIGITSVGYGIIDYETRDVIDAGVRLFKEANVENNEGRRSKRGARRLKRRRRHRIQRVKKLLFDYNLLTDHSELSGINPYEARVKGLSQKLSEEEFSAALLHLAKRRGVHNVNEVEEDTGNELSTKEQISRNSKALEEKYVAELQLERLKKDGEVRGSINRFKTSDYVKEAKQLLKVQKAYHQLDQSFIDTYIDLLETRRTYYEGPGEGSPFGWKDIKEWYEMLMGHCTYFPEELRSVKYAYNADLYNALNDLNNLVITRDENEKLEYYEKFQIIENVFKQKKKPTLKQIAKEILVNEEDIKGYRVTSTGKPEFTNLKVYHDIKDITARKEIIENAELLDQIAKILTIYQSSEDIQEELTNLNSELTQEEIEQISNLKGYTGTHNLSLKAINLILDELWHTNDNQIAIFNRLKLVPKKVDLSQQKEIPTTLVDDFILSPVVKRSFIQSIKVINAIIKKYGLPNDIIIELAREKNSKDAQKMINEMQKRNRQTNERIEEIIRTTGKENAKYLIEKIKLHDMQEGKCLYSLEAIPLEDLLNNPFNYEVDHIIPRSVSFDNSFNNKVLVKQEENSKKGNRTPFQYLSSSDSKISYETFKKHILNLAKGKGRISKTKKEYLLEERDINRFSVQKDFINRNLVDTRYATRGLMNLLRSYFRVNNLDVKVKSINGGFTSFLRRKWKFKKERNKGYKHHAEDALIIANADFIFKEWKKLDKAKKVMENQMFEEKQAESMPEIETEQEYKEIFITPHQIKHIKDFKDYKYSHRVDKKPNRKLINDTLYSTRKDDKGNTLIVNNLNGLYDKDNDKLKKLINKSPEKLLMYHHDPQTYQKLKLIMEQYGDEKNPLYKYYEETGNYLTKYSKKDNGPVIKKIKYYGNKLNAHLDITDDYPNSRNKVVKLSLKPYRFDVYLDNGVYKFVTVKNLDVIKKENYYEVNSKCYEEAKKLKKISNQAEFIASFYKNDLIKINGELYRVIGVNNSTRNIVELNMIDITYREYLENMNDKRPPHIIKTIASKTQSIKKYSTDILGNLYEVKSKKHPQIIKKG

SEQ ID NO: 1963 - protein, 1053 aa, synthetic construct
  source 1..1053: note = Description of Artificial Sequence: Synthetic polypeptide
MKRNYILGLDIGITSVGYGIIDYETRDVIDAGVRLFKEANVENNEGRRSKRGARRLKRRRRHRIQRVKKLLFDYNLLTDHSELSGINPYEARVKGLSQKLSEEEFSAALLHLAKRRGVHNVNEVEEDTGNELSTKEQISRNSKALEEKYVAELQLERLKKDGEVRGSINRFKTSDYVKEAKQLLKVQKAYHQLDQSFIDTYIDLLETRRTYYEGPGEGSPFGWKDIKEWYEMLMGHCTYFPEELRSVKYAYNADLYNALNDLNNLVITRDENEKLEYYEKFQIIENVFKQKKKPTLKQIAKEILVNEEDIKGYRVTSTGKPEFTNLKVYHDIKDITARKEIIENAELLDQIAKILTIYQSSEDIQEELTNLNSELTQEEIEQISNLKGYTGTHNLSLKAINLILDELWHTNDNQIAIFNRLKLVPKKVDLSQQKEIPTTLVDDFILSPVVKRSFIQSIKVINAIIKKYGLPNDIIIELAREKNSKDAQKMINEMQKRNRQTNERIEEIIRTTGKENAKYLIEKIKLHDMQEGKCLYSLEAIPLEDLLNNPFNYEVDHIIPRSVSFDNSFNNKVLVKQEENSKKGNRTPFQYLSSSDSKISYETFKKHILNLAKGKGRISKTKKEYLLEERDINRFSVQKDFINRNLVDTRYATRGLMNLLRSYFRVNNLDVKVKSINGGFTSFLRRKWKFKKERNKGYKHHAEDALIIANADFIFKEWKKLDKAKKVMENQMFEEKQAESMPEIETEQEYKEIFITPHQIKHIKDFKDYKYSHRVDKKPNRKLINDTLYSTRKDDKGNTLIVNNLNGLYDKDNDKLKKLINKSPEKLLMYHHDPQTYQKLKLIMEQYGDEKNPLYKYYEETGNYLTKYSKKDNGPVIKKIKYYGNKLNAHLDITDDYPNSRNKVVKLSLKPYRFDVYLDNGVYKFVTVKNLDVIKKENYYEVNSKCYEEAKKLKKISNQAEFIASFYKNDLIKINGELYRVIGVNSDDRNIIELNMIDITYREYLENMNDKRPPHIIKTIASKTQSIKKYSTDILGNLYEVKSKKHPQIIKKG

SEQ ID NO: 1964 - protein, 1053 aa, synthetic construct
  source 1..1053: note = Description of Artificial Sequence: Synthetic polypeptide
MKRNYILGLDIGITSVGYGIIDYETRDVIDAGVRLFKEANVENNEGRRSKRGARRLKRRRRHRIQRVKKLLFDYNLLTDHSELSGINPYEARVKGLSQKLSEEEFSAALLHLAKRRGVHNVNEVEEDTGNELSTKEQISRNSKALEEKYVAELQLERLKKDGEVRGSINRFKTSDYVKEAKQLLKVQKAYHQLDQSFIDTYIDLLETRRTYYEGPGEGSPFGWKDIKEWYEMLMGHCTYFPEELRSVKYAYNADLYNALNDLNNLVITRDENEKLEYYEKFQIIENVFKQKKKPTLKQIAKEILVNEEDIKGYRVTSTGKPEFTNLKVYHDIKDITARKEIIENAELLDQIAKILTIYQSSEDIQEELTNLNSELTQEEIEQISNLKGYTGTHNLSLKAINLILDELWHTNDNQIAIFNRLKLVPKKVDLSQQKEIPTTLVDDFILSPVVKRSFIQSIKVINAIIKKYGLPNDIIIELAREKNSKDAQKMINEMQKRNRQTNERIEEIIRTTGKENAKYLIEKIKLHDMQEGKCLYSLEAIPLEDLLNNPFNYEVDHIIPRSVSFDNSFNNKVLVKQEENSKKGNRTPFQYLSSSDSKISYETFKKHILNLAKGKGRISKTKKEYLLEERDINRFSVQKDFINRNLVDTRYATRGLMNLLRSYFRVNNLDVKVKSINGGFTSFLRRKWKFKKERNKGYKHHAEDALIIANADFIFKEWKKLDKAKKVMENQMFEEKQAESMPEIETEQEYKEIFITPHQIKHIKDFKDYKYSHRVDKKPNRKLINDTLYSTRKDDKGNTLIVNNLNGLYDKDNDKLKKLINKSPEKLLMYHHDPQTYQKLKLIMEQYGDEKNPLYKYYEETGNYLTKYSKKDNGPVIKKIKYYGNKLNAHLDITDDYPNSRNKVVKLSLKPYRFDVYLDNGVYKFVTVKNLDVIKKENYYEVNSKCYEEAKKLKKISNQAEFIASFYKNDLIKINGELYRVIGVNNNRLNKIELNMIDITYREYLENMNDKRPPHIIKTIASKTQSIKKYSTDILGNLYEVKSKKHPQIIKKG

SEQ ID NO: 1965 - protein, 1084 aa, synthetic construct
  source 1..1084: note = Description of Artificial Sequence: Synthetic polypeptide
MKYHVGIDVGTFSVGLAAIEVDDAGMPIKTLSLVSHIHDSGLDPDEIKSAVTRLASSGIARRTRRLYRRKRRRLQQLDKFIQRQGWPVIELEDYSDPLYPWKVRAELAASYIADEKERGEKLSVALRHIARHRGWRNPYAKVSSLYLPDGPSDAFKAIREEIKRASGQPVPETATVGQMVTLCELGTLKLRGEGGVLSARLQQSDYAREIQEICRMQEIGQELYRKIIDVVFAAESPKGSASSRVGKDPLQPGKNRALKASDAFQRYRIAALIGNLRVRVDGEKRILSVEEKNLVFDHLVNLTPKKEPEWVTIAEILGIDRGQLIGTATMTDDGERAGARPPTHDTNRSIVNSRIAPLVDWWKTASALEQHAMVKALSNAEVDDFDSPEGAKVQAFFADLDDDVHAKLDSLHLPVGRAAYSEDTLVRLTRRMLSDGVDLYTARLQEFGIEPSWTPPTPRIGEPVGNPAVDRVLKTVSRWLESATKTWGAPERVIIEHVREGFVTEKRAREMDGDMRRRAARNAKLFQEMQEKLNVQGKPSRADLWRYQSVQRQNCQCAYCGSPITFSNSEMDHIVPRAGQGSTNTRENLVAVCHRCNQSKGNTPFAIWAKNTSIEGVSVKEAVERTRHWVTDTGMRSTDFKKFTKAVVERFQRATMDEEIDARSMESVAWMANELRSRVAQHFASHGTTVRVYRGSLTAEARRASGISGKLKFFDGVGKSRLDRRHHAIDAAVIAFTSDYVAETLAVRSNLKQSQAHRQEAPQWREFTGKDAEHRAAWRVWCQKMEKLSALLTEDLRDDRVVVMSNVRLRLGNGSAHKETIGKLSKVKLSSQLSVSDIDKASSEALWCALTREPGFDPKEGLPANPERHIRVNGTHVYAGDNIGLFPVSAGSIALRGGYAELGSSFHHARVYKITSGKKPAFAMLRVYTIDLLPYRNQDLFSVELKPQTMSMRQAEKKLRDALATGNAEYLGWLVVDDELVVDTSKIATDQVKAVEAELGTIRRWRVDGFFSPSKLRLRPLQMSKEGIKKESAPELSKIIDRPGWLPAVNKLFSDGNVTVVRRDSLGRVRLESTAHLPVTWKVQ

SEQ ID NO: 1966 - protein, 984 aa, synthetic construct
  source 1..984: note = Description of Artificial Sequence: Synthetic polypeptide
MARILAFDIGISSIGWAFSENDELKDCGVRIFTKVENPKTGESLALPRRLARSARKRLARRKARLNHLKHLIANEFKLNYEDYQSFDESLAKAYKGSLISPYELRFRALNELLSKQDFARVILHIAKRRGYDDIKNSDDKEKGAILKAIKQNEEKLANYQSVGEYLYKEYFQKFKENSKEFTNVRNKKESYERCIAQSFLKDELKLIFKKQREFGFSFSKKFEEEVLSVAFYKRALKDFSHLVGNCSFFTDEKRAPKNSPLAFMFVALTRIINLLNNLKNTEGILYTKDDLNALLNEVLKNGTLTYKQTKKLLGLSDDYEFKGEKGTYFIEFKKYKEFIKALGEHNLSQDDLNEIAKDITLIKDEIKLKKALAKYDLNQNQIDSLSKLEFKDHLNISFKALKLVTPLMLEGKKYDEACNELNLKVAINEDKKDFLPAFNETYYKDEVTNPVVLRAIKEYRKVLNALLKKYGKVHKINIELAREVGKNHSQRAKIEKEQNENYKAKKDAELECEKLGLKINSKNILKLRLFKEQKEFCAYSGEKIKISDLQDEKMLEIDHIYPYSRSFDDSYMNKVLVFTKQNQEKLNQTPFEAFGNDSAKWQKIEVLAKNLPTKKQKRILDKNYKDKEQKNFKDRNLNDTRYIARLVLNYTKDYLDFLPLSDDENTKLNDTQKGSKVHVEAKSGMLTSALRHTWGFSAKDRNNHLHHAIDAVIIAYANNSIVKAFSDFKKEQESNSAELYAKKISELDYKNKRKFFEPFSGFRQKVLDKIDEIFVSKPERKKPSGALHEETFRKEEEFYQSYGGKEGVLKALELGKIRKVNGKIVKNGDMFRVDIFKHKKTNKFYAVPIYTMDFALKVLPNKAVARSKKGEIKDWILMDENYEFCFSLYKDSLILIQTKDMQEPEFVYYNAFTSSTVSLIVSKHDNKFETLSKNQKILFKNANEKEVIAKSIGIQNLKVFEKYIVSALGEVTKAEFRQREDFKK

SEQ ID NO: 1967 - protein, 1087 aa, synthetic construct
  source 1..1087: note = Description of Artificial Sequence: Synthetic polypeptide
MRYKIGLDIGITSVGWAVMNLDIPRIEDLGVRIFDRAENPQTGESLALPRRLARSARRRLRRRKHRLERIRRLVIREGILTKEELDKLFEEKHEIDVWQLRVEALDRKLNNDELARVLLHLAKRRGFKSNRKSERSNKENSTMLKHIEENRAILSSYRTVGEMIVKDPKFALHKRNKGENYTNTIARDDLEREIRLIFSKQREFGNMSCTEEFENEYITIWASQRPVASKDDIEKKVGFCTFEPKEKRAPKATYTFQSFIAWEHINKLRLISPSGARGLTDEERRLLYEQAFQKNKITYHDIRTLLHLPDDTYFKGIVYDRGESRKQNENIRFLELDAYHQIRKAVDKVYGKGKSSSFLPIDFDTFGYALTLFKDDADIHSYLRNEYEQNGKRMPNLANKVYDNELIEELLNLSFTKFGHLSLKALRSILPYMEQGEVYSSACERAGYTFTGPKKKQKTMLLPNIPPIANPVVMRALTQARKVVNAIIKKYGSPVSIHIELARDLSQTFDERRKTKKEQDENRKKNETAIRQLMEYGLTLNPTGHDIVKFKLWSEQNGRCAYSLQPIEIERLLEPGYVEVDHVIPYSRSLDDSYTNKVLVLTRENREKGNRIPAEYLGVGTERWQQFETFVLTNKQFSKKKRDRLLRLHYDENEETEFKNRNLNDTRYISRFFANFIREHLKFAESDDKQKVYTVNGRVTAHLRSRWEFNKNREESDLHHAVDAVIVACTTPSDIAKVTAFYQRREQNKELAKKTEPHFPQPWPHFADELRARLSKHPKESIKALNLGNYDDQKLESLQPVFVSRMPKRSVTGAAHQETLRRYVGIDERSGKIQTVVKTKLSEIKLDASGHFPMYGKESDPRTYEAIRQRLLEHNNDPKKAFQEPLYKPKKNGEPGPVIRTVKIIDTKNQVIPLNDGKTVAYNSNIVRVDVFEKDGKYYCVPVYTMDIMKGILPNKAIEPNKPYSEWKEMTEDYTFRFSLYPNDLIRIELPREKTVKTAAGEEINVKDVFVYYKTIDSANGGLELISHDHRFSLRGVGSRTLKRFEKYQVDVLGNIYKVRGEKRVGLASSAHSKPGKTIRPLQSTRD

SEQ ID NO: 1968 - protein, 1378 aa, synthetic construct
  source 1..1378: note = Description of Artificial Sequence: Synthetic polypeptide
MDKKYSIGLDIGTNSVGWAVITDEYKVPSKKFKVLGNTDRHSIKKNLIGALLFDSGETAEATRLKRTARRRYTRRKNRICYLQEIFSNEMAKVDDSFFHRLEESFLVEEDKKHERHPIFGNIVDEVAYHEKYPTIYHLRKKLVDSTDKADLRLIYLALAHMIKFRGHFLIEGDLNPDNSDVDKLFIQLVQTYNQLFEENPINASGVDAKAILSARLSKSRKLENLIAQLPGEKKNGLFGNLIALSLGLTPNFKSNFDLAEDAKLQLSKDTYDDDLDNLLAQIGDQYADLFLAAKNLSDAILLSDILRVNTEITKAPLSASMIKRYDEHHQDLTLLKALVRQQLPEKYKEIFFDQSKNGYAGYIDGGASQEEFYKFIKPILEKMDGTEELLVKLKREDLLRKQRTFDNGSIPHQIHLGELHAILRRQEDFYPFLKDNREKIEKILTFRIPYYVGPLARGNSRFAWMTRKSEETITPWNFEEVVDKGASAQSFIERMTNFDKNLPNEKVLPKHSLLYEYFTVYNELTKVKYVTEGMRKPAFLSGEQKKAIVDLLFKTNRKVTVKQLKEDYFKKIECFDSVEISGVEDRFNASLGTYHDLLKIIKDKDFLDNEENEDILEDIVLTLTLFEDREMIEERLKTYAHLFDDKVMKQLKRRRYTGWGRLSRKLINGIRDKQSGKTILDFLKSDGFANRNFMQLIHDDSLTFKEDIQKAQVSGQGDSLHEHIANLAGSPAIKKGILQTVKVVDELVKVMGRHKPENIVIEMARENQTTQKGQKNSRERMKRIEEGIKELGSQILKEHPVENTQLQNEKLYLYYLQNGRDMYVDQELDINRLSDYDVDHIVPQSFLKDDSIDNKVLTRSDKNRGKSDNVPSEEVVKKMKNYWRQLLNAKLITQRKFDNLTKAERGGLSELDKAGFIKRQLVETRQITKHVAQILDSRMNTKYDENDKLIREVKVITLKSKLVSDFRKDFQFYKVREINNYHHAHDAYLNAVVGTALIKKYPKLESEFVYGDYKVYDVRKMIAKSEQEIGKATAKYFFYSNIMNFFKTEITLANGEIRKRPLIETNGETGEIVWDKGRDFATVRKVLSMPQVNIVKKTEIQTVGQNGGLFDDNPKSPLEVTPSKLVPLKKELNPKKYGGYQKPTTAYPVLLITDTKQLIPISVMNKKQFEQNPVKFLRDRGYQQVGKNDFIKLPKYTLVDIGDGIKRLWASSKEIHKGNQLVVSKKSQILLYHAHHLDSDLSNDYLQNHNQQFDVLFNEIISFSKKCKLGKEHIQKIENVYSNKKNSASIEELAESFIKLLGFTQLGATSPFNFLGVKLNQKQYKGKKDYILPCTEGTLIRQSITGLYETRVDLSKIGEDSGGSGGSKRTADGSEFES

SEQ ID NO: 1969 - protein, 1082 aa, synthetic construct
  source 1..1082: note = Description of Artificial Sequence: Synthetic polypeptide
MAAFKPNSINYILGLDIGIASVGWAMVEIDEEENPIRLIDLGVRVFERAEVPKTGDSLAMARRLARSVRRLTRRRAHRLLRTRRLLKREGVLQAANFDENGLIKSLPNTPWQLRAAALDRKLTPLEWSAVLLHLIKHRGYLSQRKNEGETADKELGALLKGVAGNAHALQTGDFRTPAELALNKFEKESGHIRNQRSDYSHTFSRKDLQAELILLFEKQKEFGNPHVSGGLKEGIETLLMTQRPALSGDAVQKMLGHCTFEPAEPKAAKNTYTAERFIWLTKLNNLRILEQGSERPLTDTERATLMDEPYRKSKLTYAQARKLLGLEDTAFFKGLRYGKDNAEASTLMEMKAYHAISRALEKEGLKDKKSPLNLSPELQDEIGTAFSLFKTDEDITGRLKDRIQPEILEALLKHISFDKFVQISLKALRRIVPLMEQGKRYDEACAEIYGDHYGKKNTEEKIYLPPIPADEIRNPVVLRALSQARKVINGVVRRYGSPARIHIETAREVGKSFKDRKEIEKRQEENRKDREKAAAKFREYFPNFVGEPKSKDILKLRLYEQQHGKCLYSGKEINLGRLNEKGYVEIDHALPFSRTWDDSFNNKVLVLGSENQNKGNQTPYEYFNGKDNSREWQEFKARVETSRFPRSKKQRILLQKFDEDGFKERNLNDTRYVNRFLCQFVADRMRLTGKGKKRVFASNGQITNLLRGFWGLRKVRAENDRHHALDAVVVACSTVAMQQKITRFVRYKEMNAFDGKTIDKETGEVLHQKTHFPQPWEFFAQEVMIRVFGKPDGKPEFEEADTLEKLRTLLAEKLSSRPEAVHEYVTPLFVSRAPNRKMSGQGHMETVKSAKRLDEGVSVLRVPLTQLKLKDLEKMVNREREPKLYEALKARLEAHKDDPAKAFAEPFYKYDKAGNRTQQVKAVRVEQVQKTGVWVRNHNGIADNATMVRVDVFEKGDKYYLVPIYSWQVAKGILPDRAVVQGKDEEDWQLIDDSFNFKFSLHPNDLVEVITKKARMFGYFASCHRGTGNINIRIHDLDHKIGKNGILEGIGVKTALSFQKYQIDELGKEIRPCRLKKRPPVR

SEQ ID NO: 1970 - protein, 1375 aa, synthetic construct
  source 1..1375: note = Description of Artificial Sequence: Synthetic polypeptide
MEKKYSIGLDIGTNSVGWAVITDDYKVPSKKFKVLGNTNRKSIKKNLMGALLFDSGETAEATRLKRTARRRYTRRKNRIRYLQEIFANEMAKLDDSFFQRLEESFLVEEDKKNERHPIFGNLADEVAYHRNYPTIYHLRKKLADSPEKADLRLIYLALAHIIKFRGHFLIEGKLNAENSDVAKLFYQLIQTYNQLFEESPLDEIEVDAKGILSARLSKSKRLEKLIAVFPNEKKNGLFGNIIALALGLTPNFKSNFDLTEDAKLQLSKDTYDDDLDELLGQIGDQYADLFSAAKNLSDAILLSDILRSNSEVTKAPLSASMVKRYDEHHQDLALLKTLVRQQFPEKYAEIFKDDTKNGYAGYVGIGIKHRKRTTKLATQEEFYKFIKPILEKMDGAEELLAKLNRDDLLRKQRTFDNGSIPHQIHLKELHAILRRQEEFYPFLKENREKIEKILTFRIPYYVGPLARGNSRFAWLTRKSEEAITPWNFEEVVDKGASAQSFIERMTNFDEQLPNKKVLPKHSLLYEYFTVYNELTKVKYVTERMRKPEFLSGEQKKAIVDLLFKTNRKVTVKQLKEDYFKKIECFDSVEIIGVEDRFNASLGTYHDLLKIIKDKDFLDNEENEDILEDIVLTLTLFEDREMIEERLKTYAHLFDDKVMKQLKRRHYTGWGRLSRKMINGIRDKQSGKTILDFLKSDGFSNRNFMQLIHDDSLTFKEEIEKAQVSGQGDSLHEQIADLAGSPAIKKGILQTVKIVDELVKVMGHKPENIVIEMARENQTTTKGLQQSRERKKRIEEGIKELESQILKENPVENTQLQNEKLYLYYLQNGRDMYVDQELDINRLSDYDVDHIVPQSFIKDDSIDNKVLTRSVENRGKSDNVPSEEVVKKMKNYWRQLLNAKLITQRKFDNLTKAERGGLSEADKAGFIKRQLVETRQITKHVARILDSRMNTKRDKNDKPIREVKVITLKSKLVSDFRKDFQLYKVRDINNYHHAHDAYLNAVVGTALIKKYPKLESEFVYGDYKVYDVRKMIAKSEQEIGKATAKRFFYSNIMNFFKTEVKLANGEIRKRPLIETNGETGEVVWNKEKDFATVRKVLAMPQVNIVKKTEVQTGGFSKESILSKRESAKLIPRKKGWDTRKYGGFGSPTVAYSILVVAKVEKGKAKKLKSVKVLVGITIMEKGSYEKDPIGFLEAKGYKDIKKELIFKLPKYSLFELENGRRRMLASATELQKANELVLPQHLVRLLYYTQNISATTGSNNLGYIEQHREEFKEIFEKIIDFSEKYILKNKVNSNLKSSFDEQFAVSDSILLSNSFVSLLKYTSFGASGGFTFLDLDVKQGRLRYQTVTEVLDATLIYQSITGLYETRTDLSQLGGD

SEQ ID NO: 1971 - protein, 1375 aa, synthetic construct
  source 1..1375: note = Description of Artificial Sequence: Synthetic polypeptide
MEKKYSIGLDIGTNSVGWAVITDDYKVPSKKFKVLGNTNRKSIKKNLMGALLFDSGETAEATRLKRTARRRYTRRKNRIRYLQEIFANEMAKLDDSFFQRLEESFLVEEDKKNERHPIFGNLADEVAYHRNYPTIYHLRKKLADSPEKADLRLIYLALAHIIKFRGHFLIEGKLNAENSDVAKLFYQLIQTYNQLFEESPLDEIEVDAKGILSARLSKSKRLEKLIAVFPNEKKNGLFGNIIALALGLTPNFKSNFDLTEDAKLQLSKDTYDDDLDELLGQIGDQYADLFSAAKNLSDAILLSDILRSNSEVTKAPLSASMVKRYDEHHQDLALLKTLVRQQFPEKYAEIFKDDTKNGYAGYVGADKKLRKRSGKLATEEEFYKFIKPILEKMDGAEELLAKLNRDDLLRKQRTFDNGSIPHQIHLKELHAILRRQEEFYPFLKENREKIEKILTFRIPYYVGPLARGNSRFAWLTRKSEEAITPWNFEEVVDKGASAQSFIERMTNFDEQLPNKKVLPKHSLLYEYFTVYNELTKVKYVTERMRKPEFLSGEQKKAIVDLLFKTNRKVTVKQLKEDYFKKIECFDSVEIIGVEDRFNASLGTYHDLLKIIKDKDFLDNEENEDILEDIVLTLTLFEDREMIEERLKTYAHLFDDKVMKQLKRRHYTGWGRLSRKMINGIRDKQSGKTILDFLKSDGFSNANFMQLIHDDSLTFKEEIEKAQVSGQGDSLHEQIADLAGSPAIKKGILQTVKIVDELVKVMGHKPENIVIEMARENQTTTKGLQQSRERKKRIEEGIKELESQILKENPVENTQLQNEKLYLYYLQNGRDMYVDQELDINRLSDYDVDHIVPQSFIKDDSIDNKVLTRSVENRGKSDNVPSEEVVKKMKNYWRQLLNAKLITQRKFDNLTKAERGGLSEADKAGFIKRQLVETRQITKHVARILDSRMNTKRDKNDKPIREVKVITLKSKLVSDFRKDFQLYKVRDINNYHHAHDAYLNAVVGTALIKKYPKLESEFVYGDYKVYDVRKMIAKSEQEIGKATAKRFFYSNIMNFFKTEVKLANGEIRKRPLIETNGETGEVVWNKEKDFATVRKVLAMPQVNIVKKTEVQTGGFSKESILSKRESAKLIPRKKGWDTRKYGGFGSPTVAYSILVVAKVEKGKAKKLKSVKVLVGITIMEKGSYEKDPIGFLEAKGYKDIKKELIFKLPKYSLFELENGRRRMLASAKELQKANELVLPQHLVRLLYYTQNISATTGSNNLGYIEQHREEFKEIFEKIIDFSEKYILKNKVNSNLKSSFDEQFAVSDSILLSNSFVSLLKYTSFGASGGFTFLDLDVKQGRLRYQTVTEVLDATLIYQSITGLYETRTDLSQLGGD

SEQ ID NO: 1972 - protein, 1368 aa, synthetic construct
  source 1..1368: note = Description of Artificial Sequence: Synthetic polypeptide
MDKKYSIGLDIGTNSVGWAVITDEYKVPSKKFKVLGNTDRHSIKKNLIGALLFDSGETAEATRLKRTARRRYTRRKNRICYLQEIFSNEMAKVDDSFFHRLEESFLVEEDKKHERHPIFGNIVDEVAYHEKYPTIYHLRKKLVDSTDKADLRLIYLALAHMIKFRGHFLIEGDLNPDNSDVDKLFIQLVQTYNQLFEENPINASGVDAKAILSARLSKSRRLENLIAQLPGEKKNGLFGNLIALSLGLTPNFKSNFDLAEDAKLQLSKDTYDDDLDNLLAQIGDQYADLFLAAKNLSDAILLSDILRVNTEITKAPLSASMVKRYDEHHQDLTLLKALVRQQLPEKYKEIFFDQSKNGYAGYIDGGASQEEFYKFIKPILEKMDGTEELLVKLNREDLLRKQRTFDNGIIPHQIHLGELHAILRRQGDFYPFLKDNREKIEKILTFRIPYYVGPLARGNSRFAWMTRKSEETITPWNFEEVVDKGASAQSFIERMTNFDKNLPNEKVLPKHSLLYEYFTVYNELTKVKYVTEGMRKPAFLSGEQKKAIVDLLFKTNRKVTVKQLKEDYFKKIECFDSVEISGVEDRFNASLGTYHDLLKIIKDKDFLDNEENEDILEDIVLTLTLFEDREMIEERLKTYAHLFDDKVMKQLKRLRYTGWGRLSRKLINGIRDKQSGKTILDFLKSDGFANRNFMQLIHDDSLTFKEDIQKAQVSGQGDSLHEHIANLAGSPAIKKGILQTVKVVDELVKVMGGHKPENIVIEMARENQTTQKGQKNSRERMKRIEEGIKELGSQILKEHPVENTQLQNEKLYLYYLQNGRDMYVDQELDINRLSDYDVDHIVPQSFLKDDSIDNKVLTRSDKNRGKSDNVPSEEVVKKMKNYWRQLLNAKLITQRKFDNLTKAERGGLSELDKAGFIKRQLVETRQITKHVAQILDSRMNTKYDENDKLIREVKVITLKSKLVSDFRKDFQFYKVREINNYHHAHDAYLNAVVGTALIKKYPKLESEFVYGDYKVYDVRKMIAKSEQEIGKATAKYFFYSNIMNFFKTEITLANGEIRKRPLIETNGETGEIVWDKGRDFATVRKVLSMPQVNIVKKTEVQTGGFSKESILPKGNSDKLIARKKDWDPKKYGGFNSPTAAYSVLVVAKVEKGKSKKLKSVKELLGITIMERSSFEKNPIGFLEAKGYKEVKKDLIIKLPKYSLFELENGRKRMLASAGVLHKGNELALPSKYVNFLYLASHYEKLKGSPEDNEQKQLFVEQHKHYLDEIIEQISEFSKRVILADANLDKVLSAYNKHRDKPIREQAENIIHLFTLTNLGVPAAFKYFDTTIDKKRYTSTKEVLDATLIHQSITGLYETRIDLSQLGGD

SEQ ID NO: 1973 - protein, 1368 aa, synthetic construct
  source 1..1368: note = Description of Artificial Sequence: Synthetic polypeptide
MDKKYSIGLDIGTNSVGWAVITDEYKVPSKKFKVLGNTDRHSIKKNLIGALLFDSGETAEATRLKRTARRRYTRRKNRICYLQEIFSNEMAKVDDSFFHRLEESFLVEEDKKHERHPIFGNIVDEVAYHEKYPTIYHLRKKLVDSTDKADLRLIYLALAHMIKFRGHFLIEGDLNPDNSDVDKLFIQLVQTYNQLFEENPINASGVDAKAILSARLSKSRRLENLIAQLPGEKKNGLFGNLIALSLGLTPNFKSNFDLAEDAKLQLSKDTYDDDLDNLLAQIGDQYADLFLAAKNLSDAILLSDILRVNTEITKAPLSASMVKRYDEHHQDLTLLKALVRQQLPEKYKEIFFDQSKNGYAGYIDGGASQEEFYKFIKPILEKMDGTEELLVKLNREDLLRKQRTFDNGIIPHQIHLGELHAILRRQGDFYPFLKDNREKIEKILTFRIPYYVGPLARGNSRFAWMTRKSEETITPWNFEEVVDKGASAQSFIERMTNFDKNLPNEKVLPKHSLLYEYFTVYNELTKVKYVTEGMRKPAFLSGEQKKAIVDLLFKTNRKVTVKQLKEDYFKKIECFDSVEISGVEDRFNASLGTYHDLLKIIKDKDFLDNEENEDILEDIVLTLTLFEDREMIEERLKTYAHLFDDKVMKQLKRLRYTGWGRLSRKLINGIRDKQSGKTILDFLKSDGFANRNFMQLIHDDSLTFKEDIQKAQVSGQGDSLHEHIANLAGSPAIKKGILQTVKVVDELVKVMGGHKPENIVIEMARENQTTQKGQKNSRERMKRIEEGIKELGSQILKEHPVENTQLQNEKLYLYYLQNGRDMYVDQELDINRLSDYDVDHIVPQSFLKDDSIDNKVLTRSDKNRGKSDNVPSEEVVKKMKNYWRQLLNAKLITQRKFDNLTKAERGGLSELDKAGFIKRQLVETRQITKHVAQILDSRMNTKYDENDKLIREVKVITLKSKLVSDFRKDFQFYKVREINNYHHAHDAYLNAVVGTALIKKYPKLESEFVYGDYKVYDVRKMIAKSEQEIGKATAKYFFYSNIMNFFKTEITLANGEIRKRPLIETNGETGEIVWDKGRDFATVRKVLSMPQVNIVKKTEVQTGGFSKESILPKGNSDKLIARKKDWDPKKYGGFNSPTVAYSVLVVAKVEKGKSKKLKSVKELLGITIMERSSFEKNPIGFLEAKGYKEVKKDLIIKLPKYSLFELENGRKRMLASASVLHKGNELALPSKYVNFLYLASHYEKLKGSSEDNKQKQLFVEQHKHYLDEIIEQISEFSKRVILADANLDKVLSAYNKHRDKPIREQAENIIHLFTLTNLGASAAFKYFDTTIGRKLYTSTKEVLDATLIHQSITGLYETRIDLSQLGGD

SEQ ID NO: 1974 - protein, 1368 aa, synthetic construct
  source 1..1368: note = Description of Artificial Sequence: Synthetic polypeptide
MDKKYSIGLDIGTNSVGWAVITDEYKVPSKKFKVLGNTDRHSIKKNLIGALLFDSGETAEATRLKRTARRRYTRRKNRICYLQEIFSNEMAKVDDSFFHRLEESFLVEEDKKHERHPIFGNIVDEVAYHEKYPTIYHLRKKLVDSTDKADLRLIYLALAHMIKFRGHFLIEGDLNPDNSDVDKLFIQLVQTYNQLFEENPINASGVDAKAILSARLSKSRRLENLIAQLPGEKKNGLFGNLIALSLGLTPNFKSNFDLAEDAKLQLSKDTYDDDLDNLLAQIGDQYADLFLAAKNLSDAILLSDILRVNTEITKAPLSASMVKRYDEHHQDLTLLKALVRQQLPEKYKEIFFDQSKNGYAGYIDGGASQEEFYKFIKPILEKMDGTEELLVKLNREDLLRKQRTFDNGIIPHQIHLGELHAILRRQGDFYPFLKDNREKIEKILTFRIPYYVGPLARGNSRFAWMTRKSEETITPWNFEEVVDKGASAQSFIERMTNFDKNLPNEKVLPKHSLLYEYFTVYNELTKVKYVTEGMRKPAFLSGEQKKAIVDLLFKTNRKVTVKQLKEDYFKKIECFDSVEISGVEDRFNASLGTYHDLLKIIKDKDFLDNEENEDILEDIVLTLTLFEDREMIEERLKTYAHLFDDKVMKQLKRLRYTGWGRLSRKLINGIRDKQSGKTILDFLKSDGFANRNFMQLIHDDSLTFKEDIQKAQVSGQGDSLHEHIANLAGSPAIKKGILQTVKVVDELVKVMGGHKPENIVIEMARENQTTQKGQKNSRERMKRIEEGIKELGSQILKEHPVENTQLQNEKLYLYYLQNGRDMYVDQELDINRLSDYDVDHIVPQSFLKDDSIDNKVLTRSDKNRGKSDNVPSEEVVKKMKNYWRQLLNAKLITQRKFDNLTKAERGGLSELDKAGFIKRQLVETRQITKHVAQILDSRMNTKYDENDKLIREVKVITLKSKLVSDFRKDFQFYKVREINNYHHAHDAYLNAVVGTALIKKYPKLESEFVYGDYKVYDVRKMIAKSEQEIGKATAKYFFYSNIMNFFKTEITLANGEIRKRPLIETNGETGEIVWDKGRDFATVRKVLSMPQVNIVKKTEVQTGGFSKESILPKGNSDKLIARKKDWDPKKYGGFNSPTVAYSVLVVAKVEKGKSKKLKSVKELLGITIMERSSFEKNPIDFLEAKGYKEVKKDLIIKLPKYSLFELENGRKRMLASAGVLQKGNELALPSKYVNFLYLASHYEKLKGSPEDNEQKQLFVEQHKHYLDEIIEQISEFSKRVILADANLDKVLSAYNKHRDKPIREQAENIIHLFTLTNLGAPAAFKYFDTTINRKQYNTTKEVLDATLIRQSITGLYETRIDLSQLGGD

SEQ ID NO: 1975 - protein, 1368 aa, synthetic construct [sequence omitted]

SEQ ID NO: 1976 - protein, 1368 aa, synthetic construct
  source 1..1368: note = Description of Artificial Sequence: Synthetic polypeptide
MDKKYSIGLDIGTNSVGWAVITDEYKVPSKKFKVLGNTDRHSIKKNLIGALLFDSGETAEATRLKRTARRRYTRRKNRICYLQEIFSNEMAKVDDSFFHRLEESFLVEEDKKHERHPIFGNIVDEVAYHEKYPTIYHLRKKLVDSTDKADLRLIYLALAHMIKFRGHFLIEGDLNPDNSDVDKLFIQLVQTYNQLFEENPINASGVDAKAILSARLSKSRRLENLIAQLPGEKKNGLFGNLIALSLGLTPNFKSNFDLAEDAKLQLSKDTYDDDLDNLLAQIGDQYADLFLAAKNLSDAILLSDILRVNTEITKAPLSASMIKRYDEHHQDLTLLKALVRQQLPEKYKEIFFDQSKNGYAGYIDGGASQEEFYKFIKPILEKMDGTEELLVKLNREDLLRKQRTFDNGSIPHQIHLGELHAILRRQEDFYPFLKDNREKIEKILTFRIPYYVGPLARGNSRFAWMTRKSEETITPWNFEEVVDKGASAQSFIERMTNFDKNLPNEKVLPKHSLLYEYFTVYNELTKVKYVTEGMRKPAFLSGEQKKAIVDLLFKTNRKVTVKQLKEDYFKKIECFDSVEISGVEDRFNASLGTYHDLLKIIKDKDFLDNEENEDILEDIVLTLTLFEDREMIEERLKTYAHLFDDKVMKQLKRRRYTGWGRLSRKLINGIRDKQSGKTILDFLKSDGFANRNFMQLIHDDSLTFKEDIQKAQVSGQGDSLHEHIANLAGSPAIKKGILQTVKVVDELVKVMGRHKPENIVIEMARENQTTQKGQKNSRERMKRIEEGIKELGSQILKEHPVENTQLQNEKLYLYYLQNGRDMYVDQELDINRLSDYDVDHIVPQSFLKDDSIDNKVLTRSDKNRGKSDNVPSEEVVKKMKNYWRQLLNAKLITQRKFDNLTKAERGGLSELDKAGFIKRQLVETRQITKHVAQILDSRMNTKYDENDKLIREVKVITLKSKLVSDFRKDFQFYKVREINNYHHAHDAYLNAVVGTALIKKYPKLESEFVYGDYKVYDVRKMIAKSEQEIGKATAKYFFYSNIMNFFKTEITLANGEIRKRPLIETNGETGEIVWDKGRDFATVRKVLSMPQVNIVKKTEVQTGGFSKESILPKRNSDKLIARKKDWDPKKYGGFDSPTVAYSVLVVAKVEKGKSKKLKSVKELLGITIMERSSFEKNPIDFLEAKGYKEVKKDLIIKLPKYSLFELENGRKRMLASARELQKGNELALPSKYVNFLYLASHYEKLKGSPEDNEQKQLFVEQHKHYLDEIIEQISEFSKRVILADAQLDKVLSAYNKHRDKPIREQAENIIHLFTLTNLGAPAAFKYFDTTFKQKQYRSTKEVLDATLIHQSITGLYETRIDLSQLGGD

SEQ ID NO: 1977 - protein, 1368 aa, synthetic construct
  source 1..1368: note = Description of Artificial Sequence: Synthetic polypeptide
MDKKYSIGLDIGTNSVGWAVITDEYKVPSKKFKVLGNTDRHSIKKNLIGALLFDSGETAEATRLKRTARRRYTRRKNRICYLQEIFSNEMAKVDDSFFHRLEESFLVEEDKKHERHPIFGNIVDEVAYHEKYPTIYHLRKKLVDSTDKADLRLIYLALAHMIKFRGHFLIEGDLNPDNSDVDKLFIQLVQTYNQLFEENPINASGVDAKAILSARLSKSRRLENLIAQLPGEKKNGLFGNLIALSLGLTPNFKSNFDLAEDAKLQLSKDTYDDDLDNLLAQIGDQYADLFLAAKNLSDAILLSDILRVNTEITKAPLSASMIKRYDEHHQDLTLLKALVRQQLPEKYKEIFFDQSKNGYAGYIDGGASQEEFYKFIKPILEKMDGTEELLVKLNREDLLRKQRTFDNGSIPHQIHLGELHAILRRQEDFYPFLKDNREKIEKILTFRIPYYVGPLARGNSRFAWMTRKSEETITPWNFEEVVDKGASAQSFIERMTNFDKNLPNEKVLPKHSLLYEYFTVYNELTKVKYVTEGMRKPAFLSGEQKKAIVDLLFKTNRKVTVKQLKEDYFKKIECFDSVEISGVEDRFNASLGTYHDLLKIIKDKDFLDNEENEDILEDIVLTLTLFEDREMIEERLKTYAHLFDDKVMKQLKRRRYTGWGRLSRKLINGIRDKQSGKTILDFLKSDGFANRNFMQLIHDDSLTFKEDIQKAQVSGQGDSLHEHIANLAGSPAIKKGILQTVKVVDELVKVMGRHKPENIVIEMARENQTTQKGQKNSRERMKRIEEGIKELGSQILKEHPVENTQLQNEKLYLYYLQNGRDMYVDQELDINRLSDYDVDHIVPQSFLKDDSIDNKVLTRSDKNRGKSDNVPSEEVVKKMKNYWRQLLNAKLITQRKFDNLTKAERGGLSELDKAGFIKRQLVETRQITKHVAQILDSRMNTKYDENDKLIREVKVITLKSKLVSDFRKDFQFYKVREINNYHHAHDAYLNAVVGTALIKKYPKLESEFVYGDYKVYDVRKMIAKSEQEIGKATAKYFFYSNIMNFFKTEITLANGEIRKRPLIETNGETGEIVWDKGRDFATVRKVLSMPQVNIVKKTEVQTGGFSKESILPKRNSDKLIARKKDWDPKKYGGFLWPTVAYSVLVVAKVEKGKSKKLKSVKELLGITIMERSSFEKNPIDFLEAKGYKEVKKDLIIKLPKYSLFELENGRKRMLASAKQLQKGNELALPSKYVNFLYLASHYEKLKGSPEDNEQKQLFVEQHKHYLDEIIEQISEFSKRVILADANLDKVLSAYNKHRDKPIREQAENIIHLFTLTNLGAPAAFKYFDTTIDRKQYRSTKEVLDATLIHQSITGLYETRIDLSQLGGD

SEQ ID NO: 1978 - protein, 1368 aa, synthetic construct
  source 1..1368: note = Description of Artificial Sequence: Synthetic polypeptide
MDKKYSIGLDIGTNSVGWAVITDEYKVPSKKFKVLGNTDRHSIKKNLIGALLFDSGETAEATRLKRTARRRYTRRKNRICYLQEIFSNEMAKVDDSFFHRLEESFLVEEDKKHERHPIFGNIVDEVAYHEKYPTIYHLRKKLVDSTDKADLRLIYLALAHMIKFRGHFLIEGDLNPDNSDVDKLFIQLVQTYNQLFEENPINASGVDAKAILSARLSKSRRLENLIAQLPGEKKNGLFGNLIALSLGLTPNFKSNFDLAEDAKLQLSKDTYDDDLDNLLAQIGDQYADLFLAAKNLSDAILLSDILRVNTEITKAPLSASMIKRYDEHHQDLTLLKALVRQQLPEKYKEIFFDQSKNGYAGYIDGGASQEEFYKFIKPILEKMDGTEELLVKLNREDLLRKQRTFDNGSIPHQIHLGELHAILRRQEDFYPFLKDNREKIEKILTFRIPYYVGPLARGNSRFAWMTRKSEETITPWNFEEVVDKGASAQSFIERMTNFDKNLPNEKVLPKHSLLYEYFTVYNELTKVKYVTEGMRKPAFLSGEQKKAIVDLLFKTNRKVTVKQLKEDYFKKIECFDSVEISGVEDRFNASLGTYHDLLKIIKDKDFLDNEENEDILEDIVLTLTLFEDREMIEERLKTYAHLFDDKVMKQLKRRRYTGWGRLSRKLINGIRDKQSGKTILDFLKSDGFANRNFMQLIHDDSLTFKEDIQKAQVSGQGDSLHEHIANLAGSPAIKKGILQTVKVVDELVKVMGRHKPENIVIEMARENQTTQKGQKNSRERMKRIEEGIKELGSQILKEHPVENTQLQNEKLYLYYLQNGRDMYVDQELDINRLSDYDVDHIVPQSFLKDDSIDNKVLTRSDKNRGKSDNVPSEEVVKKMKNYWRQLLNAKLITQRKFDNLTKAERGGLSELDKAGFIKRQLVETRQITKHVAQILDSRMNTKYDENDKLIREVKVITLKSKLVSDFRKDFQFYKVREINNYHHAHDAYLNAVVGTALIKKYPKLESEFVYGDYKVYDVRKMIAKSEQEIGKATAKYFFYSNIMNFFKTEITLANGEIRKRPLIETNGETGEIVWDKGRDFATVRKVLSMPQVNIVKKTEVQTGGFSKESILPKRNSDKLIARKKDWDPKKYGGFVSPTVAYSVLVVAKVEKGKSKKLKSVKELLGITIMERSSFEKNPIDFLEAKGYKEVKKDLIIKLPKYSLFELENGRKRMLASAGELQKGNELALPSKYVNFLYLASHYEKLKGSPEDNEQKQLFVEQHKHYLDEIIEQISEFSKRVILADANLDKVLSAYNKHRDKPIREQAENIIHLFTLTNLGAPAAFKYFDTTIDRKQYRSTKEVLDATLIHQSITGLYETRIDLSQLGGD

SEQ ID NO: 1979 - protein, 1368 aa, synthetic construct
  source 1..1368: note = Description of Artificial Sequence: Synthetic polypeptide
MDKKYSIGLDIGTNSVGWAVITDEYKVPSKKFKVLGNTDRHSIKKNLIGALLFDSGETAEATRLKRTARRRYTRRKNRICYLQEIFSNEMAKVDDSFFHRLEESFLVEEDKKHERHPIFGNIVDEVAYHEKYPTIYHLRKKLVDSTDKADLRLIYLALAHMIKFRGHFLIEGDLNPDNSDVDKLFIQLVQTYNQLFEENPINASGVDAKAILSARLSKSRRLENLIAQLPGEKKNGLFGNLIALSLGLTPNFKSNFDLAEDAKLQLSKDTYDDDLDNLLAQIGDQYADLFLAAKNLSDAILLSDILRVNTEITKAPLSASMIKRYDEHHQDLTLLKALVRQQLPEKYKEIFFDQSKNGYAGYIDGGASQEEFYKFIKPILEKMDGTEELLVKLNREDLLRKQRTFDNGSIPHQIHLGELHAILRRQEDFYPFLKDNREKIEKILTFRIPYYVGPLARGNSRFAWMTRKSEETITPWNFEEVVDKGASAQSFIERMTNFDKNLPNEKVLPKHSLLYEYFTVYNELTKVKYVTEGMRKPAFLSGEQKKAIVDLLFKTNRKVTVKQLKEDYFKKIECFDSVEISGVEDRFNASLGTYHDLLKIIKDKDFLDNEENEDILEDIVLTLTLFEDREMIEERLKTYAHLFDDKVMKQLKRRRYTGWGRLSRKLINGIRDKQSGKTILDFLKSDGFANRNFMQLIHDDSLTFKEDIQKAQVSGQGDSLHEHIANLAGSPAIKKGILQTVKVVDELVKVMGRHKPENIVIEMARENQTTQKGQKNSRERMKRIEEGIKELGSQILKEHPVENTQLQNEKLYLYYLQNGRDMYVDQELDINRLSDYDVDHIVPQSFLKDDSIDNKVLTRSDKNRGKSDNVPSEEVVKKMKNYWRQLLNAKLITQRKFDNLTKAERGGLSELDKAGFIKRQLVETRQITKHVAQILDSRMNTKYDENDKLIREVKVITLKSKLVSDFRKDFQFYKVREINNYHHAHDAYLNAVVGTALIKKYPKLESEFVYGDYKVYDVRKMIAKSEQEIGKATAKYFFYSNIMNFFKTEITLANGEIRKRPLIETNGETGEIVWDKGRDFATVRKVLSMPQVNIVKKTEVQTGGFSKESILPKRNSDKLIARKKDWDPKKYGGFVSPTVAYSVLVVAKVEKGKSKKLKSVKELLGITIMERSSFEKNPIDFLEAKGYKEVKKDLIIKLPKYSLFELENGRKRMLASARELQKGNELALPSKYVNFLYLASHYEKLKGSPEDNEQKQLFVEQHKHYLDEIIEQISEFSKRVILADANLDKVLSAYNKHRDKPIREQAENIIHLFTLTNLGAPAAFKYFDTTIDRKEYRSTKEVLDATLIHQSITGLYETRIDLSQLGGD

SEQ ID NO: 1980 - protein, 1368 aa, synthetic construct
  source 1..1368: note = Description of Artificial Sequence: Synthetic polypeptide
MDKKYSIGLDIGTNSVGWAVITDEYKVPSKKFKVLGNTDRHSIKKNLIGALLFDSGETAEATRLKRTARRRYTRRKNRICYLQEIFSNEMAKVDDSFFHRLEESFLVEEDKKHERHPIFGNIVDEVAYHEKYPTIYHLRKKLVDSTDKADLRLIYLALAHMIKFRGHFLIEGDLNPDNSDVDKLFIQLVQTYNQLFEENPINASGVDAKAILSARLSKSRRLENLIAQLPGEKKNGLFGNLIALSLGLTPNFKSNFDLAEDTKLQLSKDTYDDDLDNLLAQIGDQYADLFLAAKNLSDAILLSDILRVNTEITKAPLSASMIKLYDEHHQDLTLLKALVRQQLPEKYKEIFFDQSKNGYAGYIDGGASQEEFYKFIKPILEKMDGTEELLVKLNREDLLRKQRTFDNGIIPHQIHLGELHAILRRQEDFYPFLKDNREKIEKILTFRIPYYVGPLARGNSRFAWMTRKSEETITPWNFEKVVDKGASAQSFIERMTNFDKNLPNEKVLPKHSLLYEYFTVYNELTKVKYVTEGMRKPAFLSGDQKKAIVDLLFKTNRKVTVKQLKEDYFKKIECFDSVEISGVEDRFNASLGTYHDLLKIIKDKDFLDNEENEDILEDIVLTLTLFEDREMIEERLKTYAHLFDDKVMKQLKRRRYTGWGRLSRKLINGIRDKQSGKTILDFLKSDGFANRNFIQLIHDDSLTFKEDIQKAQVSGQGDSLHEHIANLAGSPAIKKGILQTVKVVDELVKVMGRHKPENIVIEMARENQTTQKGQKNSRERMKRIEEGIKELGSQILKEHPVENTQLQNEKLYLYYLQNGRDMYVDQELDINRLSDYDVDHIVPQSFLKDDSIDNKVLTRSDKNRGKSDNVPSEEVVKKMKNYWRQLLNAKLITQRKFDNLTKAERGGLSELDKAGFIKRQLVETRQITKHVAQILDSRMNTKYDENDKLIREVKVITLKSKLVSDFRKDFQFYKVREINNYHHAHDAYLNAVVGTALIKKYPKLESEFVYGDYKVYDVRKMIAKSEQEIGKATAKYFFYSNIMNFFKTEITLANGEIRKRPLIETNGETGEIVWDKGRDFATVRKVLSMPQVNIVKKTEVQTGGFSKESILPKRNSDKLIARKKDWDPKKYGGFDSPTVAYSVLVVAKVEKGKSKKLKSVKELLGITIMERSSFEKNPIDFLEAKGYKEVKKDLIIKLPKYSLFELENGRKRMLASAGVLQKGNELALPSKYVNFLYLASHYEKLKGSPEDNEQKQLFVEQHKHYLDEIIEQISEFSKRVILADANLDKVLSAYNKHRDKPIREQAENIIHLFTLTNLGAPAAFKYFDTTIDRKRYTSTKEVLDATLIHQSITGLYETRIDLSQLGGD

SEQ ID NO: 1981 - protein, 1368 aa, synthetic construct
  source 1..1368: note = Description of Artificial Sequence: Synthetic polypeptide
MDKKYSIGLDIGTNSVGWAVITDEYKVPSKKFKVLGNTDRHSIKKNLIGALLFDSGETAEATRLKRTARRRYTRRKNRICYLQEIFSNEMAKVDDSFFHRLEESFLVEEDKKHERHPIFGNIVDEVAYHEKYPTIYHLRKKLVDSTDKADLRLIYLALAHMIKFRGHFLIEGDLNPDNSDVDKLFIQLVQTYNQLFEENPINASGVDAKAILSARLSKSRRLENLIAQLPGEKKNGLFGNLIALSLGLTPNFKSNFDLAEDTKLQLSKDTYDDDLDNLLAQIGDQYADLFLAAKNLSDAILLSDILRVNTEITKAPLSASMIKLYDEHHQDLTLLKALVRQQLPEKYKEIFFDQSKNGYAGYIDGGASQEEFYKFIKPILEKMDGTEELLVKLNREDLLRKQRTFDNGIIPHQIHLGELHAILRRQEDFYPFLKDNREKIEKILTFRIPYYVGPLARGNSRFAWMTRKSEETITPWNFEKVVDKGASAQSFIERMTNFDKNLPNEKVLPKHSLLYEYFTVYNELTKVKYVTEGMRKPAFLSGDQKKAIVDLLFKTNRKVTVKQLKEDYFKKIECFDSVEISGVEDRFNASLGTYHDLLKIIKDKDFLDNEENEDILEDIVLTLTLFEDREMIEERLKTYAHLFDDKVMKQLKRRRYTGWGRLSRKLINGIRDKQSGKTILDFLKSDGFANRNFIQLIHDDSLTFKEDIQKAQVSGQGDSLHEHIANLAGSPAIKKGILQTVKVVDELVKVMGRHKPENIVIEMARENQTTQKGQKNSRERMKRIEEGIKELGSQILKEHPVENTQLQNEKLYLYYLQNGRDMYVDQELDINRLSDYDVDHIVPQSFLKDDSIDNKVLTRSDKNRGKSDNVPSEEVVKKMKNYWRQLLNAKLITQRKFDNLTKAERGGLSELDKAGFIKRQLVETRQITKHVAQILDSRMNTKYDENDKLIREVKVITLKSKLVSDFRKDFQFYKVREINNYHHAHDAYLNAVVGTALIKKYPKLESEFVYGDYKVYDVRKMIAKSEQEIGKATAKYFFYSNIMNFFKTEITLANGEIRKRPLIETNGETGEIVWDKGRDFATVRKVLSMPQVNIVKKTEVQTGGFSKESIRPKRNSDKLIARKKDWDPKKYGGFVSPTVAYSVLVVAKVEKGKSKKLKSVKELLGITIMERSSFEKNPIDFLEAKGYKEVKKDLIIKLPKYSLFELENGRKRMLASARFLQKGNELALPSKYVNFLYLASHYEKLKGSPEDNEQKQLFVEQHKHYLDEIIEQISEFSKRVILADANLDKVLSAYNKHRDKPIREQAENIIHLFTLTNLGAPRAFKYFDTTIDRKVYRSTKEVLDATLIHQSITGLYETRIDLSQLGGD

SEQ ID NO: 1982 - protein, 1122 aa, synthetic construct
  source 1..1122: note = Description of Artificial Sequence: Synthetic polypeptide
MSDLVLGLDIGIGSVGVGILNKVTGEIIHKNSRIFPAAQAENNLVRRTNRQGRRLARRKKHRRVRLNRLFEESGLITDFTKISINLNPYQLRVKGLTDELSNEELFIALKNMVKHRGISYLDDASDDGNSSVGDYAQIVKENSKQLETKTPGQIQLERYQTYGQLRGDFTVEKDGKKHRLINVFPTSAYRSEALRILQTQQEFNPQITDEFINRYLEILTGKRKYYHGPGNEKSRTDYGRYRTSGETLDNIFGILIGKCTFYPDEFRAAKASYTAQEFNLLNDLNNLTVPTETKKLSKEQKNQIINYVKNEKAMGPAKLFKYIAKLLSCDVADIKGYRIDKSGKAEIHTFEAYRKMKTLETLDIEQMDRETLDKLAYVLTLNTEREGIQEALEHEFADGSFSQKQVDELVQFRKANSSIFGKGWHNFSVKLMMELIPELYETSEEQMTILTRLGKQKTTSSSNKTKYIDEKLLTEEIYNPVVAKSVRQAIKIVNAAIKEYGDFDNIVIEMARETNEDDEKKAIQKIQKANKDEKDAAMLKAANQYNGKAELPHSVFHGHKQLATKIRLWHQQGERCLYTGKTISIHDLINNSNQFEVDHILPLSITFDDSLANKVLVYATANQEKGQRTPYQALDSMDDAWSFRELKAFVRESKTLSNKKKEYLLTEEDISKFDVRKKFIERNLVDTRYASRVVLNALQEHFRAHKIDTKVSVVRGQFTSQLRRHWGIEKTRDTYHHHAVDALIIAASSQLNLWKKQKNTLVSYSEEQLLDIETGELISDDEYKESVFKAPYQHFVDTLKSKEFEDSILFSYQVDSKFNRKISDATIYATRQAKVGKDKKDETYVLGKIKDIYTQDGYDAFMKIYKKDKSKFLMYRHDPQTFEKVIEPILENYPNKQMNEKGKEVPCNPFLKYKEEHGYIRKYSKKGNGPEIKSLKYYDSKLLGNPIDITPENSKNKVVLQSLKPWRTDVYFNKATGKYEILGLKYADLQFEKGTGTYKISQEKYNDIKKKEGVDSDSEFKFTLYKNDLLLVKDTETKEQQLFRFLSRTLPKQKHYVELKPYDKQKFEGGEALIKVLGNVANGGQCIKGLAKSNISIYKVRTDVLGNQHIIKNEGDKPKLDF

SEQ ID NO: 1983 - protein, 1122 aa, synthetic construct
  source 1..1122: note = Description of Artificial Sequence: Synthetic polypeptide
MSDLVLGLDIGIGSVGVGILNKVTGEIIHKNSRIFPAAQAENNLVRRTNRQGRRLARRKKHRRVRLNRLFEESGLITDFTKISINLNPYQLRVKGLTDELSNEELFIALKNMVKHRGISYLDDASDDGNSSVGDYAQIVKENSKQLETKTPGQIQLERYQTYGQLRGDFTVEKDGKKHRLINVFPTSAYRSEALRILQTQQEFNPQITDEFINRYLEILTGKRKYYHGPGNEKSRTDYGRYRTSGETLDNIFGILIGKCTFYPDEFRAAKASYTAQEFNLLNDLNNLTVPTETKKLSKEQKNQIINYVKNEKAMGPAKLFKYIAKLLSCDVADIKGYRIDKSGKAEIHTFEAYRKMKTLETLDIEQMDRETLDKLAYVLTLNTEREGIQEALEHEFADGSFSQKQVDELVQFRKANSSIFGKGWHNFSVKLMMELIPELYETSEEQMTILTRLGKQKTTSSSNKTKYIDEKLLTEEIYNPVVAKSVRQAIKIVNAAIKEYGDFDNIVIEMARETNEDDEKKAIQKIQKANKDEKDAAMLKAANQYNGKAELPHSVFHGHKQLATKIRLWHQQGERCLYTGKTISIHDLINNSNQFEVDHILPLSITFDDSLANKVLVYATANQEKGQRTPYQALDSMDDAWSFRELKAFVRESKTLSNKKKEYLLTEEDISKFDVRKKFIERNLVDTRYASRVVLNALQEHFRAHKIDTKVSVVRGQFTSQLRRHWGIEKTRDTYHHHAVDALIIAASSQLNLWKKQKNTLVSYSEEQLLDIETGELISDDEYKESVFKAPYQHFVDTLKSKEFEDSILFSYQVDSKFNRKISDATIYATRQAKVGKDKKDETYVLGKIKDIYTQDGYDAFMKIYKKDKSKFLMYRHDPQTFEKVIEPILENYPNKQMNEKGKEVPCNPFLKYKEEHGYIRKYSKKGNGPEIKSLKYYDSKLLGNPIDITPENSKNKVVLQSLKPWRTDVYFNKNTGKYEILGLKYADLQFEKKTGTYKISQEKYNGIMKEEGVDSDSEFKFTLYKNDLLLVKDTETKEQQLFRFLSRTMPNVKYYVELKPYSKDKFEKNESLIEILGSADKSGRCIKGLGKSNISIYKVRTDVLGNQHIIKNEGDKPKLDF

SEQ ID NO: 1984 - protein, 1120 aa, synthetic construct
  source 1..1120: note = Description of Artificial Sequence: Synthetic polypeptide
MSDLVLGLDIGIGSVGVGILNKVTGEIIHKNSRIFPAAQAENNLVRRTNRQGRRLARRKKHRRVRLNRLFEESGLITDFTKISINLNPYQLRVKGLTDELSNEELFIALKNMVKHRGISYLDDASDDGNSSVGDYAQIVKENSKQLETKTPGQIQLERYQTYGQLRGDFTVEKDGKKHRLINVFPTSAYRSEALRILQTQQEFNPQITDEFINRYLEILTGKRKYYHGPGNEKSRTDYGRYRTSGETLDNIFGILIGKCTFYPDEFRAAKASYTAQEFNLLNDLNNLTVPTETKKLSKEQKNQIINYVKNEKAMGPAKLFKYIAKLLSCDVADIKGYRIDKSGKAEIHTFEAYRKMKTLETLDIEQMDRETLDKLAYVLTLNTEREGIQEALEHEFADGSFSQKQVDELVQFRKANSSIFGKGWHNFSVKLMMELIPELYETSEEQMTILTRLGKQKTTSSSNKTKYIDEKLLTEEIYNPVVAKSVRQAIKIVNAAIKEYGDFDNIVIEMARETNEDDEKKAIQKIQKANKDEKDAAMLKAANQYNGKAELPHSVFHGHKQLATKIRLWHQQGERCLYTGKTISIHDLINNSNQFEVDHILPLSITFDDSLANKVLVYATANQEKGQRTPYQALDSMDDAWSFRELKAFVRESKTLSNKKKEYLLTEEDISKFDVRKKFIERNLVDTRYASRVVLNALQEHFRAHKIDTKVSVVRGQFTSQLRRHWGIEKTRDTYHHHAVDALIIAASSQLNLWKKQKNTLVSYSEDQLLDIETGELISDDEYKESVFKAPYQHFVDTLKSKEFEDSILFSYQVDSKFNRKISDATIYATRQAKVGKDKADETYVLGKIKDIYTQDGYDAFMKIYKKDKSKFLMYRHDPQTFEKVIEPILENYPNKQINEKGKEVPCNPFLKYKEEHGYIRKYSKKGNGPEIKSLKYYDSKLGNHIDITPKDSNNKVVLQSLKPWRTDVYFNKNTGKYEILGLKYSDMQFEKGTGKYSISKEQYENIKVREGVDENSEFKFTLYKNDLLLLKDSENGEQILLRFTSRNDTSKHYVELKPYNRQKFEGSEYLIKSLGTVAKGGQCIKGLGKSNISIYKVRTDVLGNQHIIKNEGDKPKLDF

SEQ ID NO: 1985 - protein, 1120 aa, synthetic construct
  source 1..1120: note = Description of Artificial Sequence: Synthetic polypeptide
MSDLVLGLDIGIGSVGVGILNKVTGEIIHKNSRIFPAAQAENNLVRRTNRQGRRLARRKKHRRVRLNRLFEESGLITDFTKISINLNPYQLRVKGLTDELSNEELFIALKNMVKHRGISYLDDASDDGNSSVGDYAQIVKENSKQLETKTPGQIQLERYQTYGQLRGDFTVEKDGKKHRLINVFPTSAYRSEALRILQTQQEFNPQITDEFINRYLEILTGKRKYYHGPGNEKSRTDYGRYRTSGETLDNIFGILIGKCTFYPDEFRAAKASYTAQEFNLLNDLNNLTVPTETKKLSKEQKNQIINYVKNEKAMGPAKLFKYIAKLLSCDVADIKGYRIDKSGKAEIHTFEAYRKMKTLETLDIEQMDRETLDKLAYVLTLNTEREGIQEALEHEFADGSFSQKQVDELVQFRKANSSIFGKGWHNFSVKLMMELIPELYETSEEQMTILTRLGKQKTTSSSNKTKYIDEKLLTEEIYNPVVAKSVRQAIKIVNAAIKEYGDFDNIVIEMARETNEDDEKKAIQKIQKANKDEKDAAMLKAANQYNGKAELPHSVFHGHKQLATKIRLWHQQGERCLYTGKTISIHDLINNSNQFEVDHILPLSITFDDSLANKVLVYATANQEKGQRTPYQALDSMDDAWSFRELKAFVRESKTLSNKKKEYLLTEEDISKFDVRKKFIERNLVDTRYASRVVLNALQEHFRAHKIDTKVSVVRGQFTSQLRRHWGIEKTRDTYHHHAVDALIIAASSQLNLWKKQKNTLVSYSEDQLLDIETGELISDDEYKESVFKAPYQHFVDTLKSKEFEDSILFSYQVDSKFNRKISDATIYATRQAKVGKDKADETYVLGKIKDIYTQDGYDAFMKIYKKDKSKFLMYRHDPQTFEKVIEPILENYPNKQINEKGKEVPCNPFLKYKEEHGYIRKYSKKGNGPEIKSLKYYDSKLGNHIDITPKDSNNKVVLQSLKPWRTDVYFNKNTGKYEILGLKYSDMQFEKGTGKYSISKEQYENIKVREGVDENSEFKFTLYKNDLLLLKDSENGEQILLRFTSRNDTSKHYVELKPYNRQKFEGSEYLIKSLGTVVKGGRCIKGLGKSNISIYKVRTDVLGNQHIIKNEGDKPKLDF

SEQ ID NO: 1986 - DNA, 320 bp, synthetic construct; identical to SEQ ID NO: 1658
  source 1..320: mol_type = other DNA; note = Description of Artificial Sequence: Synthetic polynucleotide

SEQ ID NO: 1987 - DNA, 320 bp, synthetic construct; identical to SEQ ID NO: 1659
  source 1..320: mol_type = other DNA; note = Description of Artificial Sequence: Synthetic polynucleotide

SEQ ID NO: 1988 - DNA, 320 bp, synthetic construct
  source 1..320: mol_type = other DNA; note = Description of Artificial Sequence: Synthetic polynucleotide
gctcacacaggaaacagctatgaccatgattacgccaagctgttgacgcgatgtgatttctgcccagtgctctgaatgtcaaagtgaagaaattcaatgaagcgcgggtaaacggcgggagtaactatgactctctttccaatatgaaatgcctcgtcatctaattagtgacgcgcatgaatggatgaacgagattcccactgtccctacctactatccagcgaaaccacagccaagggaaattcactggccgtcgttttacaacgtcgtgactgggaaaaccctggcgttacccaacttaatcgccttgcagcacatcc

SEQ ID NO: 1989 - DNA, 320 bp, synthetic construct
  source 1..320: mol_type = other DNA; note = Description of Artificial Sequence: Synthetic polynucleotide
gctcacacaggaaacagctatgaccatgattacgccaagctgttgacgcgatgtgatttctgcccagtgctctgaatgtcaaagtgaagaaattcaatgaagcgcgggtaaacggcgggagtaactatgactctctttccaatgccaaatgcctcgtcatctaattagtgacgcgcatgaatggatgaacgagattcccactgtccctacctactatccagcgaaaccacagccaagggaaattcactggccgtcgttttacaacgtcgtgactgggaaaaccctggcgttacccaacttaatcgccttgcagcacatcc

SEQ ID NO: 1990 - DNA, 320 bp, synthetic construct
  source 1..320: mol_type = other DNA; note = Description of Artificial Sequence: Synthetic polynucleotide
gctcacacaggaaacagctatgaccatgattacgccaagctgttgacgcgatgtgatttctgcccagtgctctgaatgtcaaagtgaagaaattcaatgaagcgcgggtaaacggcgggagtaactatgactctctttccatagccaaatgcctcgtcatctaattagtgacgcgcatgaatggatgaacgagattcccactgtccctacctactatccagcgaaaccacagccaagggaaattcactggccgtcgttttacaacgtcgtgactgggaaaaccctggcgttacccaacttaatcgccttgcagcacatcc

SEQ ID NO: 1991 - DNA, 320 bp, synthetic construct
  source 1..320: mol_type = other DNA; note = Description of Artificial Sequence: Synthetic polynucleotide
gctcacacaggaaacagctatgaccatgattacgccaagctgttgacgcgatgtgatttctgcccagtgctctgaatgtcaaagtgaagaaattcaatgaagcgcgggtaaacggcgggagtaactatgactctctttcggtagccaaatgcctcgtcatctaattagtgacgcgcatgaatggatgaacgagattcccactgtccctacctactatccagcgaaaccacagccaagggaaattcactggccgtcgttttacaacgtcgtgactgggaaaaccctggcgttacccaacttaatcgccttgcagcacatcc

SEQ ID NO: 1992 - DNA, 320 bp, synthetic construct
  source 1..320: mol_type = other DNA; note = Description of Artificial Sequence: Synthetic polynucleotide
gctcacacaggaaacagctatgaccatgattacgccaagctgttgacgcgatgtgatttctgcccagtgctctgaatgtcaaagtgaagaaattcaatgaagcgcgggtaaacggcgggagtaactatgactctctttcggatatgatttgcctcgtcatctaattagtgacgcgcatgaatggatgaacgagattcccactgtccctacctactatccagcgaaaccacagccaagggaaattcactggccgtcgttttacaacgtcgtgactgggaaaaccctggcgttacccaacttaatcgccttgcagcacatcc

SEQ ID NO: 1993 - DNA, 320 bp, synthetic construct
  source 1..320: mol_type = other DNA; note = Description of Artificial Sequence: Synthetic polynucleotide
gctcacacaggaaacagctatgaccatgattacgccaagctgttgacgcgatgtgatttctgcccagtgctctgaatgtcaaagtgaagaaattcaatgaagcgcgggtaaacggcgggagtaactatgactctctttcggatatgaaatgcctcgtcatctaattagtgacgcgcatgaatggatgaacgagattcccactgtccctacctactatccagcgaaaccacagccaagggaaattcactggccgtcgttttacaacgtcgtgactgggaaaaccctggcgttacccaacttaatcgccttgcagcacatcc

SEQ ID NO: 1994 - DNA, 320 bp, synthetic construct
  source 1..320: mol_type = other DNA; note = Description of Artificial Sequence: Synthetic polynucleotide
gctcacacaggaaacagctatgaccatgattacgccaagctgttgacgcgatgtgatttctgcccagtgctctgaatgtcaaagtgaagaaattcaatgaagcgcgggtaaacggcgggagtaactatgactctctttcggatatcaaatgcctcgtcatctaattagtgacgcgcatgaatggatgaacgagattcccactgtccctacctactatccagcgaaaccacagccaagggaaattcactggccgtcgttttacaacgtcgtgactgggaaaaccctggcgttacccaacttaatcgccttgcagcacatcc

SEQ ID NO: 1995 - DNA, 320 bp, synthetic construct
  source 1..320: mol_type = other DNA; note = Description of Artificial Sequence: Synthetic polynucleotide
gctcacacaggaaacagctatgaccatgattacgccaagctgttgacgcgatgtgatttctgcccagtgctctgaatgtcaaagtgaagaaattcaatgaagcgcgggtaaacggcgggagtaactatgactctctttcggatgccaaatgcctcgtcatctaattagtgacgcgcatgaatggatgaacgagattcccactgtccctacctactatccagcgaaaccacagccaagggaaattcactggccgtcgttttacaacgtcgtgactgggaaaaccctggcgttacccaacttaatcgccttgcagcacatcc

SEQ ID NO: 1996 - DNA, 320 bp, synthetic construct
  source 1..320: mol_type = other DNA; note = Description of Artificial Sequence: Synthetic polynucleotide
gctcacacaggaaacagctatgaccatgattacgccaagctgttgacgcgatgtgatttctgcccagtgctctgaatgtcaaagtgaagaaattcaatgaagcgcgggtaaacggcgggagtaactatgactctctttaggttatgatttgcctcgtcatctaattagtgacgcgcatgaatggatgaacgagattcccactgtccctacctactatccagcgaaaccacagccaagggaaattcactggccgtcgttttacaacgtcgtgactgggaaaaccctggcgttacccaacttaatcgccttgcagcacatcc

SEQ ID NO: 1997 - DNA, 320 bp, synthetic construct
  source 1..320: mol_type = other DNA; note = Description of Artificial Sequence: Synthetic polynucleotide
gctcacacaggaaacagctatgaccatgattacgccaagctgttgacgcgatgtgatttctgcccagtgctctgaatgtcaaagtgaagaaattcaatgaagcgcgggtaaacggcgggagtaactatgactctctttaggttatgaaatgcctcgtcatctaattagtgacgcgcatgaatggatgaacgagattcccactgtccctacctactatccagcgaaaccacagccaagggaaattcactggccgtcgttttacaacgtcgtgactgggaaaaccctggcgttacccaacttaatcgccttgcagcacatcc

SEQ ID NO: 1998 - DNA, 320 bp, synthetic construct
  source 1..320: mol_type = other DNA; note = Description of Artificial Sequence: Synthetic polynucleotide
gctcacacaggaaacagctatgaccatgattacgccaagctgttgacgcgatgtgatttctgcccagtgctctgaatgtcaaagtgaagaaattcaatgaagcgcgggtaaacggcgggagtaactatgactctctttaggttatcaaatgcctcgtcatctaattagtgacgcgcatgaatggatgaacgagattcccactgtccctacctactatccagcgaaaccacagccaagggaaattcactggccgtcgttttacaacgtcgtgactgggaaaaccctggcgttacccaacttaatcgccttgcagcacatcc

SEQ ID NO: 1999 - DNA, 320 bp, synthetic construct
  source 1..320: mol_type = other DNA; note = Description of Artificial Sequence: Synthetic polynucleotide
gctcacacaggaaacagctatgaccatgattacgccaagctgttgacgcgatgtgatttctgcccagtgctctgaatgtcaaagtgaagaaattcaatgaagcgcgggtaaacggcgggagtaactatgactctcttaacaatatgatttgcctcgtcatctaattagtgacgcgcatgaatggatgaacgagattcccactgtccctacctactatccagcgaaaccacagccaagggaaattcactggccgtcgttttacaacgtcgtgactgggaaaaccctggcgttacccaacttaatcgccttgcagcacatcc

SEQ ID NO: 2000 - DNA, 320 bp, synthetic construct
  source 1..320: mol_type = other DNA; note = Description of Artificial Sequence: Synthetic polynucleotide
gctcacacaggaaacagctatgaccatgattacgccaagctgttgacgcgatgtgatttctgcccagtgctctgaatgtcaaagtgaagaaattcaatgaagcgcgggtaaacggcgggagtaactatgactctcttaaggatatgatttgcctcgtcatctaattagtgacgcgcatgaatggatgaacgagattcccactgtccctacctactatccagcgaaaccacagccaagggaaattcactggccgtcgttttacaacgtcgtgactgggaaaaccctggcgttacccaacttaatcgccttgcagcacatcc

SEQ ID NO: 2001 - DNA, 320 bp, synthetic construct
  source 1..320: mol_type = other DNA; note = Description of Artificial Sequence: Synthetic polynucleotide
gctcacacaggaaacagctatgaccatgattacgccaagctgttgacgcgatgtgatttctgcccagtgctctgaatgtcaaagtgaagaaattcaatgaagcgcgggtaaacggcgggagtaactatgactctcttaaggtaatgatttgcctcgtcatctaattagtgacgcgcatgaatggatgaacgagattcccactgtccctacctactatccagcgaaaccacagccaagggaaattcactggccgtcgttttacaacgtcgtgactgggaaaaccctggcgttacccaacttaatcgccttgcagcacatcc

SEQ ID NO: 2002 - DNA, 320 bp, synthetic construct
  source 1..320: mol_type = other DNA; note = Description of Artificial Sequence: Synthetic polynucleotide
gctcacacaggaaacagctatgaccatgattacgccaagctgttgacgcgatgtgatttctgcccagtgctctgaatgtcaaagtgaagaaattcaatgaagcgcgggtaaacggcgggagtaactatgactctcttaaggtagccatttgcctcgtcatctaattagtgacgcgcatgaatggatgaacgagattcccactgtccctacctactatccagcgaaaccacagccaagggaaattcactggccgtcgttttacaacgtcgtgactgggaaaaccctggcgttacccaacttaatcgccttgcagcacatcc

SEQ ID NO: 2003 - DNA, 324 bp, synthetic construct
  source 1..324: mol_type = other DNA; note = Description of Artificial Sequence: Synthetic polynucleotide
gctcacacaggaaacagctatgaccatgattacgccgttgacgcgatgtgatttctgcccagtgctctgaatgtcaaagtgaagaaattcaatgaagcgcgggtaaacggcgggagtaactatgactctcttaaggtagccaaatgcctcgtcatctaattagtgacgcgcatgaatggatgaacgagattcccactgtccctacctactatccagcgaaaccacagccaagggaagagtggccccactgtggggtggaggggacgactgggaaaagttaggatcccctggcgttacccaacttaatcgccttgcagcacatcc

SEQ ID NO: 2004 - DNA, 323 bp, synthetic construct
  source 1..323: mol_type = other DNA; note = Description of Artificial Sequence: Synthetic polynucleotide
gctcacacaggaaacagctatgaccatgattacgccaagcttctgcctaacaggaggtgggggttagacccaatatcaggagactaggaaggaggaggcctaaggatggggcttttctgtcaccaatcctgtccctagtggccccactgtggggtggaggggacagataaaagtacccagaaccagagccacattaaccggccctgggaatataaggtggtcccagctcggggacacaggatccctggaggcagcaaacatgctgactgggaaaatctggcttcccctggcgttacccaacttaatcgccttgcagcacatcc

SEQ ID NO: 2005 - DNA, 323 bp, synthetic construct
  source 1..323: mol_type = other DNA; note = Description of Artificial Sequence: Synthetic polynucleotide
gctcacacaggaaacagctatgaccatgattacgccaagcttcgggagtaactatgactctcttaaggtagccaaatgcctcgtcaggaaggaggaggcctaaggatggggcttttctgtcaccaatcctgtccctagtggccccactgtggggtggaggggacagataaaagtacccagaaccagagccacattaaccggccctgggaatataaggtggtcccagctcggggacacaggatccctggaggcagcaaacatgctgactgggaaaacttagagaaccctggcgttacccaacttaatcgccttgcagcacatcc

SEQ ID NO: 2006 - DNA, 323 bp, synthetic construct
  source 1..323: mol_type = other DNA; note = Description of Artificial Sequence: Synthetic polynucleotide
gctcacacaggaaacagctatgaccatgattacgccaagcttctgcctaacaggaggtgggggttagacccaatatcaggagactaggaaggaggaggcctaaggatggggcttttctgtcaccaatcctgtccctagtggccccactgtggggtggaggggacagataaaagtacccagaacctgacgaggcatttggctaccttaagagagtcatagttactcccgcggggacacaggatccctggaggcagcaaacatgctgactgggaaaaccttctcggccctggcgttacccaacttaatcgccttgcagcacatcc

SEQ ID NO: 2007 - DNA, 10 bp, unidentified
  source 1..10: mol_type = unassigned DNA; note = Description of Unknown: recognition motif sequence
ttaaggtagc

SEQ ID NO: 2008 - DNA, 12 bp, unidentified
  source 1..12: mol_type = unassigned DNA; note = Description of Unknown: recognition motif sequence
aaggtagccaaa

SEQ ID NO: 2009 - DNA, 13 bp, unidentified
  source 1..13: mol_type = unassigned DNA; note = Description of Unknown: recognition motif sequence
taaggtagccaaa

SEQ ID NO: 2010 - RNA, 22 nt, Homo sapiens
  source 1..22: mol_type = unassigned RNA
tggagtgtgacaatggtgtttg

SEQ ID NO: 2011 - RNA, 22 nt, Homo sapiens
  source 1..22: mol_type = unassigned RNA
aacgccattatcacactaaata

SEQ ID NO: 2012 - protein, 22 aa, unidentified
  source 1..22: note = Description of Unknown: Target domain sequence
CPCCGTRVNSVLNLIEHLKVSH

SEQ ID NO: 2013 - protein, 22 aa, synthetic construct
  source 1..22: note = Description of Artificial Sequence: Synthetic peptide
SPSSGTRVNSVLNLIEHLKVSH

SEQ ID NO: 2014 - protein, 22 aa, synthetic construct
  source 1..22: note = Description of Artificial Sequence: Synthetic peptide
CEVCNRDFTTKIGLGQHKRLAH

SEQ ID NO: 2015 - protein, 22 aa, synthetic construct
  source 1..22: note = Description of Artificial Sequence: Synthetic peptide
SEVSNRDFTTKIGLGQHKRLAH

SEQ ID NO: 2016 - protein, 42 aa, unidentified
  source 1..42: note = Description of Unknown: Target domain sequence
RCWTKEEEELLIRLEAQFEGNKNINKLIAEHITTKTAKQISD

SEQ ID NO: 2017 - protein, 42 aa, synthetic construct
  source 1..42: note = Description of Artificial Sequence: Synthetic polypeptide
ACATKEEEELLIRLEAQFEGNKNINKLIAEHITTKTAKQISD

SEQ ID NO: 2018 - DNA, 56 bp, synthetic construct
  source 1..56: mol_type = other DNA; note = Description of Artificial Sequence: Syntheticprimer
acactctttccctacacgacgctcttccgatctaggggaatccgactgtttaatta

SEQ ID NO: 2019 - DNA, 56 bp, synthetic construct
  source 1..56: mol_type = other DNA; note = Description of Artificial Sequence: Syntheticprimer
gtgactggagttcagacgtgtgctcttccgatctcacctctcatgtctcttcaccg

SEQ ID NO: 2020 - DNA, 55 bp, synthetic construct
  source 1..55: mol_type = other DNA; note = Description of Artificial Sequence: Syntheticprimer
acactctttccctacacgacgctcttccgatctgctcacacaggaaacagctatg

SEQ ID NO: 2021 - DNA, 54 bp, synthetic construct
  source 1..54: mol_type = other DNA; note = Description of Artificial Sequence: Syntheticprimer
gtgactggagttcagacgtgtgctcttccgatctggatgtgctgcaaggcgatt

SEQ ID NO: 2022 - DNA, 55 bp, unidentified
  source 1..55: mol_type = unassigned DNA; note = Description of Unknown: R2Tg retrotransposase cleavage site sequence
tgaagcgcgggtaaacggcgggagtaactatgactctcttaaggtagccaaatgc

SEQ ID NO: 2023 - DNA, 81 bp, unidentified
  source 1..81: mol_type = unassigned DNA; note = Description of Unknown: R2Tg retrotransposase cleavage site sequence
aaacggcgggagtaactatgactctcttaaggtagccaaatgcctcgtcatctaattagtgacgcgcatgaatggatgaac

SEQ ID NO: 2024 - DNA, 27 bp, unidentified
  source 1..27: mol_type = unassigned DNA; note = Description of Unknown: R2Tg retrotransposase cleavage site sequence
tcttaaggtagccaaatgcctcgtcat

SEQ ID NO: 2025 - DNA, 27 bp, synthetic construct
  source 1..27: mol_type = other DNA; note = Description of Artificial Sequence: Synthetic oligonucleotide
tctttccaatatgatttgcctcgtcat

SEQ ID NO: 2026 - DNA, 27 bp, synthetic construct
  source 1..27: mol_type = other DNA; note = Description of Artificial Sequence: Synthetic oligonucleotide
tctttccaatatgaaatgcctcgtcat

SEQ ID NO: 2027 - DNA, 27 bp, synthetic construct
  source 1..27: mol_type = other DNA; note = Description of Artificial Sequence: Synthetic oligonucleotide
tctttccaatgccaaatgcctcgtcat

SEQ ID NO: 2028 - DNA, 27 bp, synthetic construct
  source 1..27: mol_type = other DNA; note = Description of Artificial Sequence: Synthetic oligonucleotide
tctttccatagccaaatgcctcgtcat

SEQ ID NO: 2029 - DNA, 27 bp, synthetic construct
  source 1..27: mol_type = other DNA; note = Description of Artificial Sequence: Synthetic oligonucleotide
tctttcggtagccaaatgcctcgtcat

SEQ ID NO: 2030 - DNA, 27 bp, synthetic construct
  source 1..27: mol_type = other DNA; note = Description of Artificial Sequence: Synthetic oligonucleotide
tctttcggatatgatttgcctcgtcat

SEQ ID NO: 2031 - DNA, 27 bp, synthetic construct
  source 1..27: mol_type = other DNA; note = Description of Artificial Sequence: Synthetic oligonucleotide
tctttcggatatcaaatgcctcgtcat

SEQ ID NO: 2032 - DNA, 27 bp, synthetic construct
  source 1..27: mol_type = other DNA; note = Description of Artificial Sequence: Synthetic oligonucleotide
tctttcggatatgaaatgcctcgtcat

SEQ ID NO: 2033 - DNA, 27 bp, synthetic construct
  source 1..27: mol_type = other DNA; note = Description of Artificial Sequence: Synthetic oligonucleotide
tctttcggatgccaaatgcctcgtcat

SEQ ID NO: 2034 - DNA, 27 bp, synthetic construct
  source 1..27: mol_type = other DNA; note = Description of Artificial Sequence: Synthetic oligonucleotide
tctttaggttatgatttgcctcgtcat

SEQ ID NO: 2035 - DNA, 27 bp, synthetic construct
  source 1..27: mol_type = other DNA; note = Description of Artificial Sequence: Synthetic oligonucleotide
tctttaggttatgaaatgcctcgtcat

SEQ ID NO: 2036 - DNA, 27 bp, synthetic construct
  source 1..27: mol_type = other DNA; note = Description of Artificial Sequence: Synthetic oligonucleotide
tctttaggttatcaaatgcctcgtcat

SEQ ID NO: 2037 - DNA, 27 bp, synthetic construct
  source 1..27: mol_type = other DNA; note = Description of Artificial Sequence: Synthetic oligonucleotide
tcttaacaatatgatttgcctcgtcat

SEQ ID NO: 2038 - DNA, 27 bp, synthetic construct
  source 1..27: mol_type = other DNA; note = Description of Artificial Sequence: Synthetic oligonucleotide
tcttaaggatatgatttgcctcgtcat

SEQ ID NO: 2039 - DNA, 27 bp, synthetic construct
  source 1..27: mol_type = other DNA; note = Description of Artificial Sequence: Synthetic oligonucleotide
tcttaaggtaatgatttgcctcgtcat

SEQ ID NO: 2040 - DNA, 27 bp, synthetic construct
  source 1..27: mol_type = other DNA; note = Description of Artificial Sequence: Synthetic oligonucleotide
tcttaaggtagccatttgcctcgtcat

SEQ ID NO: 2041 - skipped

SEQ ID NO: 2042 - RNA, 100 nt, synthetic construct; identical to SEQ ID NO: 1687
  source 1..100: mol_type = other RNA
  misc_difference 1..100: note = This sequence may encompass 5, 10, 20, 30, 50, 70, or 100 nucleotides

SEQ ID NO: 2043 - RNA, 100 nt, synthetic construct; identical to SEQ ID NO: 1687
  source 1..100: mol_type = other RNA
  misc_difference 1..100: note = This sequence may encompass 30, 40, 50, 60, 70, 80, 90 or 100 nucleotides
